(19) United States
(12) Patent Application Publication
(10) Pub. No.: US 2022/0010299 A1
(43) Pub. Date: Jan. 13, 2022

(54) Systems and Methods to Enhance RNA Stability and Translation and Uses Thereof

(71) Applicant: The Board of Trustees of the Leland Stanford Junior University, Stanford, CA (US)

(72) Inventors: Rhiju Das, Palo Alto, CA (US); Christian A. Choe, Stanford, CA (US); Hannah K. Wayment-Steele, Stanford, CA (US); Wipapat Kladwang, Stanford, CA (US)

(73) Assignee: The Board of Trustees of the Leland Stanford Junior University, Stanford, CA (US)

(21) Appl. No.: 17/364,890

(22) Filed: Jul. 1, 2021

Related U.S. Application Data
(60) Provisional application No. 63/165,662, filed on Mar. 24, 2021.
(60) Provisional application No. 63/135,313, filed on Jan. 8, 2021.
(60) Provisional application No. 63/051,269, filed on Jul. 13, 2020.

(51) Int. Cl. C12N 15/10; C07K 14/005; A61K 31/7115

(52) U.S. Cl. CPC C12N 15/102; A61K 31/7115; C07K 14/005

(57) ABSTRACT

Embodiments herein describe systems and methods to enhance RNA translation and stability and uses thereof. Many embodiments generate RNA molecules possessing increased structure and/or reduced free energy over an initial sequence. Such RNA molecules can be used as therapeutics and/or vaccines.

### CROSS-REFERENCE TO RELATED APPLICATIONS

[0001] The current application claims priority to U.S. Provisional Patent Application No. 63/051,269, filed Jul. 13, 2020, U.S. Provisional Patent Application No. 63/165,662, filed Mar. 24, 2021, and U.S. Provisional Patent Application No. 63/135,313, filed Jan. 8, 2021; the disclosures of which are hereby incorporated by reference in their entireties.

### STATEMENT REGARDING FEDERALLY SPONSORED RESEARCH OR DEVELOPMENT

[0002] This invention was made with Governmental support under Contract Nos. GM122579, GM121487, and CA219847 awarded by the National Institutes of Health. The government has certain rights in the invention.

### FIELD OF THE INVENTION

[0003] The present invention relates to ribonucleic acid (RNA). More specifically, the present invention relates to RNA molecules with enhanced stability and translation. The present invention further relates to systems and methods to enhance RNA stability and translation by selecting for structure of RNA molecules.

### SEQUENCE LISTING

[0004] This application hereby incorporates by reference the material of the electronic Sequence Listing filed concurrently herewith. The material in the electronic Sequence Listing is submitted as a text (.txt) file entitled “06739_Seq_List_ST25.txt” created on Jun. 23, 2021, which has a file size of approximately 1.41 MB, and is herein incorporated by reference in its entirety.

### BACKGROUND

[0005] There are multiple problems with prior methodologies of effecting protein expression. For example, exogenous deoxyribonucleic acid (DNA) introduced into a cell can integrate into host cell genomic DNA at some frequency, resulting in alterations and/or damage to the host cell genomic DNA. Alternatively, the heterologous DNA introduced into a cell can be inherited by daughter cells (whether or not the heterologous DNA has integrated into the chromosome) or by offspring.

[0006] In addition, assuming proper delivery and no damage or integration of the heterologous DNA into the host genome, multiple steps must occur before the encoded protein is produced. Once inside the cell, DNA must be transported into the nucleus where it is transcribed into RNA. The RNA transcribed from DNA then enters the cytoplasm where it is translated into protein. The multiple processing steps from administered DNA to protein create lag times before the generation of the functional protein, and each step represents an opportunity for error and damage to the cell. Further, it is known to be difficult to obtain DNA expression in cells as DNA frequently enters a cell but is not expressed or not expressed at reasonable rates or concentrations. This can be a particular problem when DNA is introduced into primary cells or modified cell lines.

[0007] Attempts have been made to use RNA and messenger RNA (mRNA) as therapeutic agents. However, RNA is generally unstable and highly susceptible to degradation due to temperature, pH, and other factors.

### SUMMARY OF THE INVENTION

[0008] This summary is meant to provide some examples and is not intended to be limiting of the scope of the invention in any way. For example, any feature included in an example of this summary is not required by the claims, unless the claims explicitly recite the features. Various features and steps as described elsewhere in this disclosure may be included in the examples summarized here, and the features and steps described here and elsewhere can be combined in a variety of ways.

[0009] In one embodiment, an RNA therapeutic includes an RNA molecule includes a 5′ untranslated region, a 3′ untranslated region, and a coding sequence, where the 5′ untranslated region is located 5′ of the coding sequence and the 3′ untranslated region is located 3′ of the coding sequence, and where the coding sequence encodes for one or more viral epitopes.

[0010] In a further embodiment, the coding sequence is selected from the group consisting of: SEQ ID NO: 5 and SEQ ID NOs: 437-439.

[0011] In another embodiment, the RNA therapeutic further includes one or more of a lubricant, a binder, a flavorant, and a coating.

[0012] In a still further embodiment, the RNA therapeutic further includes a capsule selected from a virus, a viroid, a virion, a capsid, a bacterium, a lipid nanoparticle, a micelle, a DNA structure, and an RNA structure.

[0013] In still another embodiment, at least one nucleotide in the RNA molecule is replaced with an analog selected from the group consisting of: pseudouridine, 1-methyl-pseudouridine, and 5-methyl-cytidine, 1-methoxy-pseudouridine, and pseudo-isocytidine.

[0014] In a yet further embodiment, a method for increasing RNA stability includes obtaining a target RNA sequence including a coding sequence, altering at least one nucleotide within the RNA sequence, where the altered sequence improves a metric correlated with improved RNA function, and synthesizing an RNA molecule representing the altered sequence.

[0015] In yet another embodiment, the altering step is performed by sampling a nucleotide within the target coding sequence, where the sampled nucleotide includes an unpaired nucleotide within the coding sequence, and substituting the sampled nucleotide with a new nucleotide to create a substituted coding sequence.

[0016] In a further embodiment again, the altered sequence possesses increased structure over the target coding sequence.

[0017] In another embodiment again, the metric is selected from free energy (dG) of an RNA molecule conformation, dG of the ensemble (dG(ensemble)), codon adaptation index (CAI), and expected Matthews Correlation Coefficient (MCC).

[0018] In a further additional embodiment, the metric is selected from maximum ladder distance (MLD), unpaired nucleotides, GC content, number of hairpins, number of 3-way junctions (3WJs), number of 4-way junctions, (4WJs), number of 5-way junctions (5WJs), ratios of hairpins to junctions, number of unpaired nucleotides, kissing loops, pseudoknots, tertiary contacts, multimeric designs, dimerization domains, and symmetrical structures.

[0019] In another additional embodiment, the metric is selected from mean base pair proximity, probability of unpaired nucleotides, sum of paired bases, increased structure, summed probability of being unpaired, and predicted degradation score.

[0020] In a still yet further embodiment, the substituted coding sequence possesses a lower free energy than the target coding sequence.

[0021] In still yet another embodiment, the target RNA sequence includes at least one of a poly-A tail, a 5′ untranslated region, and a 3′ untranslated region.

[0022] In a still further embodiment again, the substituting step uses a greedy GC strategy, where if a C or G substitution is possible, the nucleotide is substituted for the nucleotide.

[0023] In still another embodiment again, the altered sequence possesses a lower DegScore than the target RNA sequence, where DegScore=a*[stem nts]+b*[internal loop nts]+c*[hairpin nts]+d*[bulge nts]+e*[multiloop nts]+f*[exterior loop nts], where nts stands for nucleotides, and a-f represent coefficients for relative reactivity of nucleotides within a particular structure.

[0024] In a still further additional embodiment, the method further includes transfecting a cell with the synthesized RNA molecule.

[0025] In still another additional embodiment, the method further includes treating an individual with the synthesized RNA molecule.

[0026] In a yet further embodiment again, the synthesized RNA molecule is formulated for medical use.

[0027] In yet another embodiment again, the synthesized RNA molecule is formulated by combining the synthesized RNA molecule with at least one of a lubricant, a binder, a flavorant, and a coating.

[0028] In a yet further additional embodiment, the synthesized RNA molecule is encapsulated in at least one of a virus, a viroid, a virion, a capsid, a bacterium, a lipid nanoparticle, a micelle, a DNA structure, and an RNA structure.

[0029] In yet another additional embodiment, altering at least one nucleotide within the RNA sequence includes replacing at least one nucleotide in the RNA sequence with an analog selected from the group consisting of: pseudouridine, 1-methyl-pseudouridine, and 5-methyl-cytidine, 1-methoxy-pseudouridine, and pseudo-isocytidine.

[0030] In a further additional embodiment again, altering at least one nucleotide is iterated at least 100 times.

[0031] In another additional embodiment again, an RNA molecule to transfect a cell includes a 5′ untranslated region, a 3′ untranslated region, and a coding sequence, where the 5′ untranslated region is located 5′ of the coding sequence and the 3′ untranslated region is located 3′ of the coding sequence.

[0032] In a still yet further embodiment again, the coding sequence codes for one or more viral epitopes.

[0033] In still yet another embodiment again, the coding sequence is selected from the group consisting of: SEQ ID NO: 5 and SEQ ID NOs: 437-439.

[0034] In a still yet further additional embodiment, the coding sequence codes for green fluorescence protein.

[0035] In still yet another additional embodiment, the coding sequence is selected from the group consisting of: SEQ ID NO: 8 and SEQ ID NOs: 12-236.

[0036] In a yet further additional embodiment again, the coding sequence codes for nanoluciferase.

[0037] In yet another additional embodiment again, the coding sequence is selected from the group consisting of SEQ ID NOs: 237-436.

[0038] In a still yet further additional embodiment again, at least one nucleotide in the RNA molecule is replaced with an analog selected from the group consisting of: pseudouridine, 1-methyl-pseudouridine, and 5-methyl-cytidine, 1-methoxy-pseudouridine, and pseudo-isocytidine.

[0039] Other features and advantages of the present invention will become apparent from the following detailed description, taken in conjunction with the accompanying drawings which illustrate, by way of example, the principles of the invention.

### BRIEF DESCRIPTION OF THE DRAWINGS

[0040] The patent or application file contains at least one drawing executed in color. Copies of this patent or patent application publication with color drawing(s) will be provided by the Office upon request and payment of the necessary fee.

[0041] The description and claims will be more fully understood with reference to the following figures and data graphs, which are presented as exemplary embodiments of the invention and should not be construed as a complete recitation of the scope of the invention.

[0042] FIG. 1 illustrates a method to design RNA molecules with improved function in accordance with various embodiments of the invention.

[0043] FIGS. 2A-2B illustrate a generalized structures of RNA molecules in accordance with various embodiments of the invention.

[0044] FIG. 3 illustrates exemplary results of in vitro versus in vivo RNA stability in accordance with various embodiments.

[0045] FIGS. 4A-4I and 5A-5M illustrate metrics for optimized RNAs in accordance with various embodiments of the invention.

[0046] FIGS. 6A-6C illustrate energy calculations of exemplary embodiments versus benchmarking molecules in accordance with various embodiments of the invention.

[0047] FIG. 7A illustrates a structure of a target RNA molecule in accordance with various embodiments of the invention.

[0048] FIG. 7B illustrates a structure of an optimized RNA molecule in accordance with various embodiments of the invention.

[0049] FIG. 8 illustrates energy calculations of exemplary embodiments versus other methods to enhance stability in accordance with various embodiments of the invention.

[0050] FIG. 9A illustrates an exemplary embodiment of parsing of a secondary structure into categories of structural motifs of an RNA in accordance with various embodiments of the invention.

[0051] FIG. 9B illustrates chemical reactivities at individual nucleotides for an RNA construct in accordance with various embodiments of the invention.

[0052] FIG. 9C illustrates a heatmap of average reactivities for various structural motifs in accordance with various embodiments of the invention.

[0053] FIGS. 10A-10B illustrate exemplary secondary structures of RNAs in accordance with various embodiments.

[0054] FIGS. 11A-11D illustrate exemplary in vitro degradation of RNAs at various time points in accordance with various embodiments.

[0055] FIG. 12 illustrates exemplary degradation rates of RNAs possessing natural and analog substitutions in accordance with various embodiments.

[0056] FIG. 13 illustrates an exemplary secondary structure of an RNA possessing paired stems and unpaired loops in accordance with various embodiments.

[0057] FIG. 14 illustrates exemplary results of RNA degradation with single nucleotide resolution of RNAs under various conditions in accordance with various embodiments.

### DETAILED DESCRIPTION

[0058] Turning now to the drawings, systems and methods to enhance RNA stability and translation and uses thereof are provided. Many embodiments provide methods that provide an algorithmic approach to mutate an RNA sequence that optimizes stability and/or translation. In certain embodiments, the increased stability and/or translation is provided by increase in structure of the resultant RNA molecule.

[0059] There is a pressing need for vaccines against new viral pandemics like COVID-19, Ebola, flu, Zika, and other zoonotic viruses that jump from animal reservoirs into humans. mRNA molecules are considered one of the fastest ways to deploy these vaccines, but degrade and change their shape and effectiveness while stored in solution, even while refrigerated. Drug companies are not able to ship vaccines in pre-loaded syringes, making the logistical costs of deploying mass immunization currently prohibitive, and also incurring major safety risks.

[0060] A significant problem in RNA stability is self-cleavage, including from inline attack of 2′-hydroxyls on phosphates within an RNA molecule. Stabilization of RNA molecules allows for mRNA and noncoding RNA molecules to remain active and/or intact across various environments, such as pre-filled syringes, such as could be used for RNA vaccines. In a variety of embodiments, the stable RNAs will be capable of space travel, environmental/agriculture applications, dissemination in animals or the human body, which could be used in biomedicine or human performance enhancement in extreme situations.

### Methods to Improve RNA Function

[0061] Turning to FIG. 1, a method 100 to design RNA molecules with improved function to treat and/or transfect in accordance with many embodiments is illustrated. In various embodiments, function is defined as increased stability and/or translation. Increased RNA stability includes reduced degradation of the RNA in any situation in which stability is desired, including (but not limited to) in vivo, in storage, during manufacture, or any combination thereof. At 102, many embodiments obtain an RNA sequence. In various embodiments, the RNA sequence comprises a partial or whole coding sequence, while in some embodiments, the RNA sequence comprises a coding sequence coupled with functional segments. Functional segments include (but are not limited to) a poly-A tail, a 5′ untranslated region (5′UTR), a 3′ untranslated region (3′UTR), and/or any other sequence to assist in RNA function.

[0062] At 104, many embodiments alter the RNA sequence to improve one or more elected RNA metrics. In various embodiments, the sequence alteration comprises stochastically sampling one or more nucleotides—i.e., selecting a random nucleotide in the RNA sequence. Many embodiments calculate the one or more elected RNA metrics after a sequence alteration in a sampled nucleotide and retain the new sequence, if the metric is improved in the altered sequence. In various embodiments, the nucleotide alteration does not change the resulting peptide or protein sequence.

[0063] Certain RNA metrics may predict stability and/or translation, and many embodiments elect the RNA metric from one or more of the following RNA metrics: free energy (dG) of an RNA molecule conformation, dG of the ensemble (dG(ensemble)) (e.g., an ensemble is a collection of various conformations of the same sequence), codon adaptation index (CAI), maximum ladder distance (MLD) (e.g., longest path along helices), expected Matthews Correlation Coefficient (MCC), unpaired nucleotides, number of hairpins, number of junctions (e.g., 3-way junctions (3WJs), 4-way junctions, (4WJs), 5-way junctions (5WJs), higher-order junctions), ratios of hairpins to one or more junctions, number of unpaired nucleotides in a structure, mean base pair proximity, probability of unpaired nucleotides, sum of paired bases, GC content, and other metrics that may correlate to enhance RNA stability and/or translation. In accordance with many embodiments, expected MCC is the estimated MCC of a predicted structure using the pseudo-accuracy method presented in Hamada (2010) and is a measure of how probable a predicted structure is. (See e.g., Hamada, et al., Prediction of RNA secondary structure by maximizing pseudo-expected accuracy, BMC Bioinformatics 11, 586 (2010); the disclosure of which is hereby incorporated by reference herein in its entirety.) Additionally, mean base pair proximity identifies an ensemble-averaged proximity between predicted based pairs, as calculated by equation 1, in accordance with certain embodiments.

2/N(N−1)Σᵢ^{N}Σ_{j>1}^{N}(j−i)p(i,j paired) (1)

[0064] In various embodiments, RNA stability is increased by manipulating a number of factors and/or predictors of stability. Previous methods have been developed to minimize free energy (dG) of RNA molecules. (See e.g., Zhang, et al. LinearDesign: Efficient Algorithms for Optimized mRNA Sequence Design, arxiv.org/abs/2004.10177; the disclosure of which is hereby incorporated by reference herein in its entirety.) However, free energy is but one of a number of factors that can be adjusted to increase RNA stability and/or translation.

[0065] In various embodiments, the sampling of individual nucleotides utilizes codon constraints—e.g., changes to a nucleotide are synonymous alterations, such that the resultant (or encoded) protein or peptide maintains the same amino acid sequence. Further embodiments include a “greedy GC” strategy—e.g., a strategy where G or C substitutions are preferred, such as (for example) a G or C substitution in the third spot of a codon trinucleotide. For example, the codon UCU could be altered to UCC or UCG, rather than UCA, while still encoding for serine, thus increasing GC content. Additionally, greedy GC or GC preferred strategies can be used outside of coding regions and codons, such as UTRs (e.g., 5′UTRs and 3′UTRs) and any other non-coding feature in an RNA molecule that can be changed without altering the function of the feature.

[0066] Additionally, various embodiments utilize the probability that certain bases are unpaired in the RNA's secondary structure. Some of these embodiments utilize a summed probability of being unpaired (Sum p(unp)), which is a count of the average number of nucleotides in the RNA that are expected to be unpaired. This determination can be computed in various RNA modeling packages. Certain embodiments use an RNA modeling package selected from Vienna 2, RNAstructure, CONTRAfold, and EternaFold to calculate probability of base paring and energy of various structural states of the RNA sequence. The Sum p(unp) metric provides an estimate of relative degradation rates of different mRNAs. In various embodiments, Sum p(unp) makes one or more assumptions selected from (1) the statistical mechanical ensemble of secondary structures predicted by the RNA modeling package reflects the RNA's actual ensemble in the experimental conditions, and (2) the rate of degradation at a given nucleotide is 0.0 if the nucleotide is base paired (in a helix), and some constant rate if it is unpaired. In certain embodiments, Sum p(unp) is multiplied by a constant chemical degradation rate to be turned into an overall rate of degradation for a full-length RNA. However, in comparisons between RNA molecules, the multiplication factor can be ignored.

[0067] In many embodiments, the relation of Sum p(unp) to degradation rate can be shown mathematically. The probability of the full length RNA remaining undegraded after time t drops exponentially as equation 2:

exp(−k_TOT t) (2)

which should equal the product of probabilities of each nucleotide remaining undegraded, exp(−k_1 t)*exp(−k_2 t)*exp(−k_N t), where k_i is the rate of each nucleotide i from 1 to the number of nucleotides N, and assumed to be proportional to the fraction of time the nucleotide I is unpaired, p_i(unp). Therefore, k_TOT is the sum of k_i and is proportional to Sum p(unp).

[0068] In various embodiments, altering the RNA sequence 104 is performed iteratively to improve the one or more elected RNA metrics. In some embodiments, altering the RNA sequence 104 is iterated at least 100 times, at least 250 times, at least 500 times, at least 750 times, at least 1000 times, at least 1500 times, at least 2000 times, at least 2500 times, at least 3000 times, at least 3500 times, at least 4000 times, at least 4500 times, at least 5000 times, at least 7500 times, at least 10,000 times, or more.

[0069] At 106, many embodiments synthesize an RNA construct representing the designed RNA sequence. Various embodiments chemically and/or biochemically synthesize the RNA construct via various known technologies. Example methods of synthesis include phosphoramidite chemistry, T7 polymerase, and any other known or applicable means of synthesizing an RNA construct or oligonucleotide. In various embodiments, the synthesized oligonucleotide comprises the coding sequence, after which, additional features (e.g., cap moiety, UTRs, etc.) can optionally be ligated to the coding sequence. In certain embodiments, the synthesized oligonucleotide comprises a full-length construct, including a cap moiety, 5′UTR, coding sequence, 3′UTR, tailing sequence or poly-A tail, and any other feature of interest to include within the construct.

[0070] Certain embodiments synthesize the construct using RNA nucleotides, while some embodiments synthesize the construct using DNA nucleotides, and additional embodiments synthesize the construct using a combination of RNA and DNA nucleotides. Further, some embodiments synthesize the oligonucleotide and its complement, which can be paired together to form a double stranded molecule, and some embodiments synthesis the oligonucleotide such that portions of the molecule are double-stranded and other portions of the molecule are single-stranded. Certain embodiments incorporate nucleotide analogs into the synthesized oligonucleotides, including pseudouridine, inosine, 5-methyl-cytosine, and other known analogs.

[0071] Optionally at 108 of some embodiments, an RNA construct is transfected into a cell and/or used in a treatment of a subject. As noted elsewhere herein, RNA constructs can have many purposes, reporter gene expression, vaccines, other RNAs for translation (such as for gene therapy, protein production, or any other use of protein production), and functional RNAs (e.g., small RNAs, interfering RNAs, ribosomal RNAs, and any other functional RNAs). As such, transfecting a cell in accordance with certain embodiments inserts the RNA into a cell directly, such as through microinjection, particle bombardment, electroporation, heat shock, or other direct transfection methods. In certain embodiments involving the treatment of an individual, an RNA construct can be formulated for a medical use, including by combining it with one or more buffers, lubricants, binders, flavorants, and coatings. Various embodiments encapsulate the RNA construct for transfection, such as through a virus (e.g., adeno-associated viruses (AAVs)), viroids, virions, capsids, bacteria (e.g., Agrobacterium spp.), lipid nanoparticles, micelles, and/or larger DNA and/or RNA structures suitable for targeting and/or stability, and/or other methods of encapsulating an RNA for transfection.

### RNA Constructs

[0072] Turning to FIGS. 2A-2B, many embodiments are directed to RNA molecules for use as a therapeutic, vaccine, and/or to produce a protein or peptide of interest. FIG. 2A illustrates a general diagram of linear RNA molecules in accordance with various embodiments, while FIG. 2B illustrates a general diagram of a circular RNA molecule in accordance with some embodiments.

[0073] Additional embodiments possess a 5′ untranslated region (5′UTR) sequence and/or a 3′UTR sequence. Certain embodiments place the 5′UTR near the 5′ end of the RNA molecule (e.g., upstream a coding or functional sequence), while the 3′UTR is located near the 3′ end of the molecule (e.g., downstream a coding or functional sequence). In some embodiments, the 5′UTR is located at the 3′ end of the cap, while additional embodiments utilize a 5′UTR without a cap sequence. Similarly, a 3′UTR can be placed at the 3′ end of a molecule. Certain embodiments select a 5′UTR and/or a 3′UTR for a variety of factors to increase stability and/or translation based on an innate sequence, while others select a 5′UTR and/or a 3′UTR for that may pose improved translation and/or stability based on a particular coding sequence of interest. Many possible 5′UTRs and 3′UTRs are known in the art, which are used in various embodiments. Some specific embodiments select the 5′UTR from human hemoglobin beta subunit (HBB) (SEQ ID NO: 1). Additional embodiments select the 3′UTR from HBB (SEQ ID NO: 2).

[0074] Many embodiments possess a coding sequence (CDS) located 3′ from the 5′UTR, and/or 5′ of the 3′UTR. In many embodiments, the beginning of the CDS is marked with the start codon AUG. In many embodiments, the end of the CDS is marked with a stop codon. The coding sequence is a designed sequence of interest to encode a protein or peptide of interest. In certain embodiments, the coding sequence encodes an epitope or other antigen to induce an immune response, thus allowing for use as a vaccine. In various embodiments, the protein or peptide of interest is used as a therapeutic, such that the protein or peptide of interest replaces or supplements a dysfunctional protein or peptide. In some embodiments, the protein or peptide of interest corrects for dysfunction of another protein or peptide. While protein coding sequences are described in the context of this exemplary embodiment, additional embodiments possess other functional sequences for non-coding RNAs, such as RNAs that guide genome editing (e.g., gRNA for use in CRISPR system) and/or coat chromatin.

[0075] Certain linear embodiments possess a 5′ cap moiety. Some embodiments utilize a 7-methyl guanosine triphosphate as the cap moiety, but various additional cap sequences are known in the art for a 5′ cap moiety. Additional embodiments possess a cap-proximal sequence for an mRNA located at the 5′ end of the mRNA. Various cap sequences are known in the art for a 5′ cap-proximal sequence. Certain embodiments use a small triplet, such GGG as the cap-proximal sequence.

[0076] Additionally, some linear embodiments possess a tailing sequence located at the 3′ end of a molecule (e.g., 3′ of the 3′UTR). In various embodiments the tailing sequence is used to add a poly-A tail or other structural sequence to an RNA molecule. In some embodiments, the tailing sequence is selected as SEQ ID NO: 3.

[0077] Further embodiments include additional sequences or components that can be used to identify sequences and/or to increase translatability, to increase stability, or to any other characteristic that may be beneficial for an RNA molecule.

### RNAs Incorporating Nucleotide Analogs

[0078] As noted above, numerous embodiments incorporate one or more nucleotide analogs. Such embodiments incorporating nucleotide analogs possess increased stability and/or translation over RNA molecules possessing solely natural (e.g., A, C, G, U) nucleotides. Additional embodiments incorporate one or more nucleotide analogs to replace some or all of the natural nucleotides within an RNA sequence. For example, some embodiments replace 5%, 10%, 15%, 20%, 25%, 30%, 35%, 40%, 45%, 50%, 55%, 60%, 65%, 70%, 75%, 80%, 85%, 90%, 95%, or 100% of a natural nucleotide with an analog (e.g., replace uracil with pseudouridine, replace cytidine with 5-methyl-cytidine, etc.). Further embodiments incorporate nucleotide analogs along with additional sequence alterations, including (but not limited to) sequence alterations for codon optimization, increased structure, or any other sequence alteration.

[0079] Pseudouridine, 1-methyl-pseudouridine, and 5-methyl-cytidine provide accurate mRNA translation in human cells, and may even enhance translation and in vivo stability and favorably reduce undesired innate immune response. (See, e.g., Karikó K, Muramatsu H, Welsh F A, et al. Incorporation of pseudouridine into mRNA yields superior nonimmunogenic vector with increased translational capacity and biological stability. Mol Ther. 2008; 16(11):1833-1840. doi:10.1038/mt.2008.200; U.S. Pat. No. 8,278,036 B2; and David M. Mauger, B. Joseph Cabral, Vladimir Presnyak, Stephen V. Su, David W. Reid, Brooke Goodman, Kristian Link, Nikhil Khatwani, John Reynders, Melissa J. Moore, lain J. McFadyen PNAS November 2019, 116 (48) 24075-24083; DOI: 10.1073/pnas.1908052116; the disclosures of which are hereby incorporated by reference in their entireties.)

[0080] However, in vivo and in vitro stability are two independent problems for RNA. In vivo stability can depend on untranslated sequences at 3′-ends of mRNAs, structures and sequences that signal decay, process that identify premature stop codons, RNA elements recognized by cellular endonucleases and exonucleases, and ribosome-dependent decay processes. (See, e.g., Koh, W. S., Porter, J. R. & Batchelor, E. Tuning of mRNA stability through altering 3′-UTR sequences generates distinct output expression in a synthetic circuit driven by p53 oscillations. Sci Rep 9, 5976 (2019). doi: 10.1038/s41598-019-42509-y; Park E, Maquat L E. Staufen-mediated mRNA decay. Wiley Interdiscip Rev RNA. 2013 Jul.-Aug.; 4(4):423-35. doi: 10.1002/wrna.1168. Epub 2013 May 16. PMID: 23681777; PMCID: PMC3711692; Brogna, S., Wen, J. Nonsense-mediated mRNA decay (NMD) mechanisms. Nat Struct Mol Biol 16, 107-113 (2009). doi: 10.1038/nsmb.1550; Blandine C. Mercier, Emmanuel Labaronne, David Cluet, Alicia Bicknell, Antoine Corbin, Laura Guiguettaz, Fabien Aube, Laurent Modolo, Didier Auboeuf, Melissa J. Moore, Emiliano P. Ricci bioRxiv 2020.10.16.341222; doi: 10.1101/2020.10.16.341222; the disclosures of which are hereby incorporated by reference in their entireties.) RNA degradation in aqueous buffers can occur in much longer time scales, but this can accelerate in the presence of magnesium (Mg²+) or in high pH. (See e.g., Hannah K. Wayment-Steele, Do Soon Kim, Christian A. Choe, John J. Nicol, Roger Wellington-Oguri, R. Andres Parra Sperberg, Po-Ssu Huang, Eterna Participants, Rhiju Das bioRxiv 2020.08.22.262931; doi: 10.1101/2020.08.22.262931; the disclosure of which is hereby incorporated by reference in its entirety.) Common strategies to stabilize mRNAs for in vivo stability (including appending long poly adenosine stretches; >100 As) can actually destabilize RNAs in vitro by adding additional locations for possible hydrolysis. Additionally, embedded structured segments, which are expected to stabilize RNAs against in-line hydrolysis have been shown to decrease stability of mRNA's inside human cells through a process termed structure-mediated RNA decay (SRD), involving cellular factors UPF1 and G3BP1. (See e.g., Fischer, Joseph W. et al. Molecular Cell, Volume 78, Issue 1, 70-84.e6; the disclosure of which is hereby incorporated by reference in its entirety.)

[0081] Turning to FIG. 3, exemplary results of an empirical study of an mRNA library coding for nanoluciferase show that decay rates in human cells exhibit no correlation with in vitro decay rates. In FIG. 3, the in cell and in vitro stability possess an r² value of 0.0005, indicating no correlation. Such measurements were carried out using a library of 233 mRNAs of varying lengths (507-1215 nucleotides) and sequences. The measurements involve a reverse-transcription based assay to count RNAs remaining after degradation times, with strong reproducibility in ranking mRNA stabilities between time points or in replicates. In-cell measurements involved mRNAs transfected into human 293 cells. In vitro measurements were carried out under hydrolysis conditions (10 mM MgCl₂, 50 mM Na-CHES, pH 10.0, 24° C.) that accelerate hydrolysis by ˜100× compared to neutral buffers without Mg²⁺.

[0082] Analogs like pseudouridine have been proposed to lead to enhanced mRNA stability in cells by stabilizing Watson-Crick base-paired helices which somehow prevent ribosome collisions and to decrease recognition by in-cell RNA sensors (e.g., in innate immunity pathways). (See e.g., David M. Mauger, et al.; cited above.) However, such effects have no applicability in in vitro environments, where immunity pathways and ribosomes do not exist. Instead, analogs may change neutrophilicity of the nucleoside's 2′-hydroxyl group, which is the attacking group in the chemical reaction, or analogs may enhance base stacking creating a local structural effect. (See e.g., Yingfu Li and Ronald R. Breaker Journal of the American Chemical Society 1999 121 (23), 5364-5372 DOI: 10.1021/ja990592p; and Davis D R. Stabilization of RNA stacking by pseudouridine. Nucleic Acids Res. 1995 Dec. 25; 23(24):5020-6. doi: 10.1093/nar/23.24.5020. PMID: 8559660; PMCID: PMC307508; the disclosures of which are hereby incorporated by reference in their entireties.) Neither the neutrophilicity or local structural effect is related to the Watson-Crick base pairing or changed recognition by proteins proposed for in-cell effects of an analog. Thus, it would not be obvious or trivial to introduce nucleotide analogs into an RNA molecule to increase in vitro stability of an RNA molecule.

[0083] Many embodiments are directed to RNA molecules comprising at least one nucleotide substitution. In many of these embodiments, the nucleotide substitution is a substitution of a natural nucleotide (e.g., A, C, G, U) with an analog and/or chemically modified analog. Such analogs include (but are not limited to) pseudouridine, 1-methyl-pseudouridine, and 5-methyl-cytidine, 1-methoxy-pseudouridine, pseudo-isocytidine, and/or any other nucleotide analog. Many embodiments are directed to methods to improve in vitro stability of an RNA molecule by incorporating one or more of the nucleotide analogs into the RNA molecule.

### Coding Sequences

[0084] As noted elsewhere herein, many embodiments select coding sequences to produce a protein or peptide of interest. Proteins and/or peptides of interest can be used for a therapeutic effect, including to generate an immunogenic response by producing an epitope, antigen, or other immunogenic molecule. While some proteins and/or peptides of interest can be used for cellular signaling and/or isolation. The number of possible sequences that code for a given amino acid sequence is astronomically large (greater than 10\hat{ }50) so it is not possible to synthesize all of them and test them. Design principles are needed to select a subset of this large set of sequences for experimental characterization.

[0085] As illustrative examples of some embodiments, certain embodiments are directed to an antigenic epitope, such as SEQ ID NO: 4, to design an RNA vaccine. The epitope (SEQ ID NO: 4) possesses a coding sequence of SEQ ID NO: 5. However, because numerous codons within a coding sequence can be synonymously mutated to result in the same peptide (e.g., SEQ ID NO: 4), a coding sequence can be relaxed to possess IUPAC constraints revealed in SEQ ID NO: 6.

[0086] Additionally, entire proteins can be created by some embodiments. As an illustrative example, SEQ ID NO: 7 includes the peptide sequence for green fluorescence protein (GFP). Additionally, SEQ ID NO: 8 includes a coding sequence for GFP, and SEQ ID NO: 9 includes a coding sequence with IUPAC constraints for GFP. Further embodiments possess a coding sequence for GFP selected from SEQ ID NOs: 12-236 and SEQ ID NOs: 440-1158.

[0087] Further embodiments include coding sequences directed to a luciferase, such as a nanoluciferase. In some of these embodiments, the nanoluciferase coding sequence is selected from SEQ ID NOs: 237-436.

[0088] As noted above, certain embodiments, are directed to immunogenic coding sequences. Some of these embodiments are directed to a multi-epitome vaccine (MEV) coding sequence. In various embodiments, the MEV is specific for a coronavirus, such as SARS-CoV-2, the virus that causes Covid-19. In certain embodiments, the coronavirus specific MEV is selected from SEQ ID NOs: 437-437 and SEQ ID NOs: 1159-1164.

### Characteristics of Molecules

[0089] Turning to FIGS. 4A-4I, various metrics are plotted for RNAs optimized for a particular parameter. In particular, FIG. 4A illustrates results for exemplary embodiments minimizing (Min) and maximizing (Max) dG(ensemble) as well as the dG(ensemble) for embodiments optimized for other parameters (Rest). Similarly, FIG. 4B illustrates results for exemplary embodiments optimized for Maximum Ladder Distance (MLD); FIG. 4C illustrates results for exemplary embodiments optimized for the number of hairpins; FIG. 4D illustrates results for exemplary embodiments optimized for the number of 3-Way Junctions; FIG. 4E illustrates results for exemplary embodiments optimized for a ratio of hairpins to 3-Way Junctions; FIG. 4F illustrates results for exemplary embodiments optimized for Mean p(unp); FIG. 4G illustrates results for exemplary embodiments optimized for the number of unpaired nucleotides in a minimum free energy (MFE) structure; FIG. 4H illustrates results for exemplary embodiments optimized for Mean Base Pair Proximity; and FIG. 4I illustrates results for exemplary embodiments optimized for CAI.

[0090] Similarly, FIGS. 5A-5M illustrate results from exemplary embodiments showing metrics, including GC content (FIG. 5A), CAI (FIG. 5B), dG of MFE (FIG. 5C), dG(ensemble) (FIG. 5D), Maximum Ladder Distance (MLD) (FIG. 5E), number of hairpins (FIG. 5F), number of internal loops (FIG. 5G), number of 3-Way Junctions (FIG. 5H), number of 4-Way Junctions (FIG. 5I), number of 5-Way Junctions (FIG. 5J), number of unpaired nucleotides (FIG. 5K), Mean p(unp) (FIG. 5L), and Mean base pair proximity (FIG. 5M) for embodiments optimized for the various conditions listed on the X-axis, including dG, dGopen, MLD, number of hairpins (HP), number of junctions (WJ), ratio of hairpins to junctions (hp/3wj), sum of paired bases (bpsum), number of unpaired bases (bpunpaired), base pair proximity (bpp), and CAI.

[0091] Turning to FIGS. 6A-6C, free energy calculations based on EternaFold and Vienna 2 are plotted of certain exemplary embodiments. As illustrated, various embodiments possess lower free energy as determined of ensemble (FIG. 6A) and minimal free energy (MFE) (FIG. 6B) as compared to various benchmarking RNAs possessing high levels of structure, middle levels of structure, and low levels of structure. In all instances, exemplary embodiments possess approximately a 25% reduction in free energy than the benchmarking proteins. Additionally, FIG. 6C illustrates that the exemplary embodiments possess increased levels of GC content than the low and middle levels of structure, however these exemplary embodiments possessed slightly lower GC content than the high structure benchmarking proteins (˜56% vs. ˜59% GC).

[0092] Turning to FIGS. 7A-7B, structures of a starting molecule (FIG. 7A) and an exemplary molecule (FIG. 7B) are illustrated. In particular, FIG. 7A illustrates a starting sequence (SEQ ID NO: 10), while FIG. 7B illustrates and exemplary embodiment (SEQ ID NO: 11) that has been optimized for lower free energy (dG) and structure based on the starting sequence. The darker shading in FIGS. 7A-7B demonstrate a higher probability of unpaired nucleotides, while lighter shading indicates a higher probability of paired nucleotides. As seen in FIGS. 7A-7B, optimized molecules of various embodiments possess increased structure and lower free energy.

[0093] Turning to FIG. 8, free energy as determined from Vienna and EternaFold are plotted for various methods to optimize molecules. As illustrated, various exemplary embodiments generally possess lower predicted free energy than other methods to design or optimize RNA molecules (e.g., Vienna, GC saturation, etc.)

### Determination of RNA Stability

[0094] Turning to FIGS. 9A-9C, an exemplary embodiment to determine RNA stability is illustrated. In particular, FIG. 9A illustrates an exemplary embodiment of parsing of a secondary structure into categories of structural motifs of a P4-P6 domain of the Tetrahymena ribozyme with two flanking GAGUA hairpins. As illustrated in FIG. 9A, structural features can generally include stem, interior loop, hairpin loop, bulge, multiloop, and exterior loop. However, some of these structures can be subdivided further, such that exterior loops can include linker loops and external loops, while multiloops can be divided into multi-way junctions (e.g., 3-way, 4-way, etc.). By identifying the reactivity of various structures, degradation scores are determined for various molecules, in accordance with many embodiments.

[0095] FIG. 9B illustrates chemical reactivities at each nucleotide (x-axis) with respect to different chemical modifiers (y-axis), applied to the P4-P6 domain of a Tetrahymena ribozyme (e.g., FIG. 7A). In FIG. 9B, regions expected to be unpaired for this RNA are marked with vertical lines. Of these regions, external linkers (marked with red labels) show consistently high reactivity (dark colors), indicating how embodiments are capable of identifying regions with higher rates of degradation under certain conditions.

[0096] Additionally, FIG. 9C illustrates a heatmap of average reactivities for various structural motifs (x-axis) with respect to 61 different chemical modifiers. In this exemplary embodiment, the heatmap is normalized to mean reactivities and median-centered before taking the averages.

[0097] Based on nucleotide reactivity, a degradation score can be determined and/or predicted for a particular sequence based on the predicted structure for an RNA sequence. The following equation provides one formula for calculating a degradation score (DegScore), in accordance with some embodiments:

DegScore=a*[stem nts]+b*[internal loop nts]+c*[hairpin nts]+d*[bulge nts]+e*[multiloop nts]+f*[exterior loop nts],

Where nts stands for nucleotides, and
a-f represent coefficients for relative reactivity of nucleotides within a particular structure. In many embodiments, the coefficients range from 0.0-1.0 (e.g., if nucleotides in exterior loops are 5× more reactive than nucleotides in an internal loop, coefficient b could equal 0.2, while coefficient f could equal 1.0).

### Exemplary Embodiments

[0098] Although the following embodiments provide details on certain embodiments of the inventions, it should be understood that these are only exemplary in nature, and are not intended to limit the scope of the invention.

### Example 1: Incorporating Nucleotide Analogs

[0099] Background: Current mRNA therapeutics and vaccine efforts that have focused explicitly on increasing stability of mRNAs and reducing costs of manufacturing (e.g., with self-amplifying mRNA vectors) have not explored use of chemical modifications for stabilization, despite widespread know-how for incorporating chemical modified nucleotides during transcription. (See e.g., Zhang N N, Li X F, Deng Y Q, et al. A Thermostable mRNA Vaccine against COVID-19. Cell. 2020; 182(5):1271-1283.e16. doi:10.1016/j.cell.2020.07.024; McKay, P. F., Hu, K., Blakney, A. K. et al. Self-amplifying RNA SARS-CoV-2 lipid nanoparticle vaccine candidate induces high neutralizing antibody titers in mice. Nat Commun 11, 3523 (2020). doi: 10.1038/s41467-020-17409-9; Erasmus, J. H., et al. Science Translational Medicine 5 Aug. 2020: Vol. 12, Issue 555, eabc9396 DOI: 10.1126/scitranslmed.abc9396; the disclosures of which are hereby incorporated by reference in their entireties.)

[0100] Methods: A nanoluciferase sequence was modified to include additional structure (e.g., stronger base pairing regions) and/or to incorporate nucleotide analogs.

[0101] Results: Turning to FIGS. 10A-10B, exemplary RNAs used in testing are illustrated encoding for nanoluciferase. FIG. 10A illustrates the secondary structure of RNA-1 (SEQ ID NO: 1165) possessing short, weakly stems, while FIG. 10B illustrates the secondary structure of RNA-2 (SEQ ID NO: 1166) possessing longer and stronger pairing regions. The stabilities of these RNAs over time are illustrated as electropherograms in FIGS. 11A-11D, specifically at time points of 0 h, 0.5 h, 1 h, 1.5 h, 2 h, 3 h, 4 h, 5 h, 18 h, and 24 h. Specifically, FIG. 11A illustrates the in vitro stability of the SEQ ID NO: 1165, while FIG. 11B illustrates the in vitro stability of the SEQ ID NO: 1166. FIGS. 11A-11B illustrate that while stronger secondary structures of SEQ ID NO: 1166 provide some increased stability, both RNAs (SEQ ID NOs: 1165-1166) show some degradation immediately leading to eventual, full degradation. FIGS. 11C-11D illustrate stability of (SEQ ID NOs: 1165-1166), wherein the natural uridines have been substituted with pseudouridine. As illustrated in FIGS. 11C-11D, the integration of pseudouridine increases stability in both RNAs over time, and full-length RNA is still present in the higher structured SEQ ID NO: 1166 after 24 hours. FIGS. 11A-11D further possess a control RNA spike in (SEQ ID NO: 1171) applied after degradation.

[0102] Turning to FIG. 12, degradation rates of various RNAs (RNAs 1-6; SEQ ID NOs: 1165-1170, respectively) possessing 5-methyl-cytosine (m5C) or pseudouridine (PSU) substitutions. For 5 of the 6 RNAs, incorporation of pseudouridine (PSU) reduces degradation rates; in three cases, the improvement is more than 2-fold. Interestingly, the cases showing strongest effects are the RNAs that were designed to have the most structure; thus, the use of pseudouridine is synergistic with other design strategies to stabilize mRNA against in vitro degradation by hydrolysis. Supporting the specificity of the analog-substitution concept, another modification, 5-methyl-cytidine (a C analog) did not change degradation rates.

[0103] To show degradation in paired and unpaired regions, an exemplary RNA, C-1 (SEQ ID NO: 1172) was utilized which has the secondary structures illustrated in FIG. 13. As seen in FIG. 13, the RNA C-1 possesses both Watson-Crick pairs stems and unpaired loops. As such, degradation rates with single nucleotide resolution can be resolved using the RNA C-1 (SEQ ID NO: 1172). Turning to FIG. 14, the degradation results are illustrated of RNA C-1 (SEQ ID NO: 1172) and RNA C-2 (SEQ ID NO: 1173), showing that degradation is suppressed at the sites of modification of U to pseudouridine or 1-methyl-pseudouridine as well as 1-2 nucleotides 5′ to the sites of modification, consistent with local enhancement of base stacking. These data also show no effects of m5C on RNA structure or degradation in vitro, consistent with data measuring degradation rates of entire mRNAs (see FIG. 12).

[0104] The stabilization to in vitro degradation does not involve changes to global RNA structure. Experiments measuring chemical accessibility of the RNA to dimethyl sulfate (DMS) and 2′-hydroxyl acylating reagents (SHAPE), which are suppressed by formation of Watson-Crick pairs, show no change in structure; in particular regions that are unpaired in the two model RNAs remain accessible to both reagents. The only change seen is the SHAPE reactivity directly at the site of substitution of U to pseudouridine or 1-methyl-pseudouridine; this supports that 2′-hydroxyl chemical reactivity is locally decreased.

[0105] Conclusions: Overall, the data show that the mechanisms by which chemically modified nucleotides stabilize RNA degradation against hydrolysis in vitro are distinct from mechanisms by which such nucleotides change the properties of RNA in cells.

### DOCTRINE OF EQUIVALENTS

[0106] Having described several embodiments, it will be recognized by those skilled in the art that various modifications, alternative constructions, and equivalents may be used without departing from the spirit of the invention. Additionally, a number of well-known processes and elements have not been described in order to avoid unnecessarily obscuring the present invention. Accordingly, the above description should not be taken as limiting the scope of the invention.

[0107] Those skilled in the art will appreciate that the foregoing examples and descriptions of various preferred embodiments of the present invention are merely illustrative of the invention as a whole, and that variations in the components or steps of the present invention may be made within the spirit and scope of the invention. Accordingly, the present invention is not limited to the specific embodiments described herein, but, rather, is defined by the scope of the appended claims.

The application's sequence listing, which the Patent Office published only in electronic form, follows.

SEQUENCE LISTING (1173 sequences)

SEQ ID NO: 1 - DNA, 50 bp, homo sapiens
acatttgcttctgacacaactgtgttcactagcaacctcaaacagacacc

SEQ ID NO: 2 - DNA, 235 bp, homo sapiens
gctcgctttcttgctgtccaatttctattaaaggttcctttgttccctaagtccaactactaaactgggggatattatgaagggccttgagcatctggattctgcctaataaaaaacatttattttcattgcaattgccatgtgtatgtgggttcgcccacatactctgatgatccccaatcgtggcgtgtcggcctgcttcggcaggcactggcgccgggatcattcatggcaa

SEQ ID NO: 3 - DNA, 22 bp, artificial sequence
  Tailing
agttccgcgtacgtacggcgtc

SEQ ID NO: 4 - protein, 47 aa, Artificial Sequence
  Epitope for vaccine
MGGSGGSGYQPYRVVVLGGSGGSPYRVVVLSFGGSGGSLSPRWYFYY

SEQ ID NO: 5 - RNA, 144 nt, Artificial Sequence
  epitope coding sequence
auggggggaucagguggguccggauaucagccguacagagucguugugcuagggggaagcggagguagucccuacagggucgucgugcuuucauucggcggaucugggggauccuuaagcccccgcugguauuuuuacuauuaa

SEQ ID NO: 6 - RNA, 144 nt, artificial sequence
  epitope IUPAC constraints
  misc_feature (6)..(6): n is a, c, g, or u
  misc_feature (9)..(9): n is a, c, g, or u
  misc_feature (12)..(12): n is a, c, g, or u
  misc_feature (15)..(15): n is a, c, g, or u
  misc_feature (18)..(18): n is a, c, g, or u
  misc_feature (21)..(21): n is a, c, g, or u
  misc_feature (24)..(24): n is a, c, g, or u
  misc_feature (33)..(33): n is a, c, g, or u
  misc_feature (39)..(39): n is a, c, g, or u
  misc_feature (42)..(42): n is a, c, g, or u
  misc_feature (45)..(45): n is a, c, g, or u
  misc_feature (48)..(48): n is a, c, g, or u
  misc_feature (51)..(51): n is a, c, g, or u
  misc_feature (54)..(54): n is a, c, g, or u
  misc_feature (57)..(57): n is a, c, g, or u
  misc_feature (60)..(60): n is a, c, g, or u
  misc_feature (63)..(63): n is a, c, g, or u
  misc_feature (66)..(66): n is a, c, g, or u
  misc_feature (69)..(69): n is a, c, g, or u
  misc_feature (72)..(72): n is a, c, g, or u
  misc_feature (78)..(78): n is a, c, g, or u
  misc_feature (81)..(81): n is a, c, g, or u
  misc_feature (84)..(84): n is a, c, g, or u
  misc_feature (87)..(87): n is a, c, g, or u
  misc_feature (90)..(90): n is a, c, g, or u
  misc_feature (93)..(93): n is a, c, g, or u
  misc_feature (99)..(99): n is a, c, g, or u
  misc_feature (102)..(102): n is a, c, g, or u
  misc_feature (105)..(105): n is a, c, g, or u
  misc_feature (108)..(108): n is a, c, g, or u
  misc_feature (111)..(111): n is a, c, g, or u
  misc_feature (114)..(114): n is a, c, g, or u
  misc_feature (117)..(117): n is a, c, g, or u
  misc_feature (120)..(120): n is a, c, g, or u
  misc_feature (123)..(123): n is a, c, g, or u
  misc_feature (126)..(126): n is a, c, g, or u
augggnggnwsnggnggnwsnggnuaycarccnuaymgngungungunyunggnggnwsnggnggnwsnccnuaymgngungungunyunwsnuuyggnggnwsnggnggnwsnyunwsnccnmgnugguayuuyuayuayurr

SEQ ID NO: 7 - protein, 264 aa, artificial sequenc
  GFP
MDYKDDDDKDYKDDDDKDYKDDDDKMVSKGEELFTGVVPILVELDGDVNGHKFSVSGEGEGDATYGKLTLKFICTTGKLPVPWPTLVTTLTYGVQCFSRYPDHMKQHDFFKSAMPEGYVQERTIFFKDDGNYKTRAEVKFEGDTLVNRIELKGIDFKEDGNILGHKLEYNYNSHNVYIMADKQKNGIKVNFKIRHNIEDGSVQLADHYQQNTPIGDGPVLLPDNHYLSTQSALSKDPNEKRDHMVLLEFVTAAGITLGMDELYK

SEQ ID NO: 8 - RNA, 795 nt, artificial sequence
  GFP Coding
auggacuacaaggacgacgacgacaaggacuacaaggacgacgacgacaaggacuacaaggacgacgacgacaagauggugucuaagggcgaggagcuguucaccggcguggugcccauccugguggagcuggacggcgacgugaacggccacaaguucucugugucuggcgagggcgagggcgacgccaccuacggcaagcugacccugaaguucaucugcaccaccggcaagcugcccgugcccuggcccacccuggugaccacccugaccuacggcgugcagugcuucucucgguaccccgaccacaugaagcagcacgacuucuucaagucugccaugcccgagggcuacgugcaggagcggaccaucuucuucaaggacgacggcaacuacaagacccgggccgaggugaaguucgagggcgacacccuggugaaccggaucgagcugaagggcaucgacuucaaggaggacggcaacauccugggccacaagcuggaguacaacuacaacucucacaacguguauaucauggccgacaagcagaagaacggcaucaaggugaacuucaagauccggcacaacaucgaggacggcucugugcagcuggccgaccacuaccagcagaacacccccaucggcgacggccccgugcugcugcccgacaaccacuaccugucuacccagucugcccugucuaaggaccccaacgagaagcgggaccacauggugcugcuggaguucgugaccgccgccggcaucacccugggcauggacgagcuguacaaguaa

SEQ ID NO: 9 - RNA, 795 nt, artificial sequenc
  GFP IUPAC Constraints
  misc_feature (81)..(81): n is a, c, g, or u
  misc_feature (84)..(84): n is a, c, g, or u
  misc_feature (90)..(90): n is a, c, g, or u
  misc_feature (99)..(99): n is a, c, g, or u
  misc_feature (105)..(105): n is a, c, g, or u
  misc_feature (108)..(108): n is a, c, g, or u
  misc_feature (111)..(111): n is a, c, g, or u
  misc_feature (114)..(114): n is a, c, g, or u
  misc_feature (117)..(117): n is a, c, g, or u
  misc_feature (123)..(123): n is a, c, g, or u
  misc_feature (126)..(126): n is a, c, g, or u
  misc_feature (132)..(132): n is a, c, g, or u
  misc_feature (138)..(138): n is a, c, g, or u
  misc_feature (144)..(144): n is a, c, g, or u
  misc_feature (150)..(150): n is a, c, g, or u
  misc_feature (162)..(162): n is a, c, g, or u
  misc_feature (165)..(165): n is a, c, g, or u
  misc_feature (168)..(168): n is a, c, g, or u
  misc_feature (171)..(171): n is a, c, g, or u
  misc_feature (177)..(177): n is a, c, g, or u
  misc_feature (183)..(183): n is a, c, g, or u
  misc_feature (189)..(189): n is a, c, g, or u
  misc_feature (192)..(192): n is a, c, g, or u
  misc_feature (198)..(198): n is a, c, g, or u
  misc_feature (204)..(204): n is a, c, g, or u
  misc_feature (207)..(207): n is a, c, g, or u
  misc_feature (210)..(210): n is a, c, g, or u
  misc_feature (225)..(225): n is a, c, g, or u
  misc_feature (228)..(228): n is a, c, g, or u
  misc_feature (231)..(231): n is a, c, g, or u
  misc_feature (237)..(237): n is a, c, g, or u
  misc_feature (240)..(240): n is a, c, g, or u
  misc_feature (243)..(243): n is a, c, g, or u
  misc_feature (246)..(246): n is a, c, g, or u
  misc_feature (252)..(252): n is a, c, g, or u
  misc_feature (255)..(255): n is a, c, g, or u
  misc_feature (258)..(258): n is a, c, g, or u
  misc_feature (261)..(261): n is a, c, g, or u
  misc_feature (264)..(264): n is a, c, g, or u
  misc_feature (267)..(267): n is a, c, g, or u
  misc_feature (270)..(270): n is a, c, g, or u
  misc_feature (273)..(273): n is a, c, g, or u
  misc_feature (279)..(279): n is a, c, g, or u
  misc_feature (282)..(282): n is a, c, g, or u
  misc_feature (294)..(294): n is a, c, g, or u
  misc_feature (297)..(297): n is a, c, g, or u
  misc_feature (303)..(303): n is a, c, g, or u
  misc_feature (336)..(336): n is a, c, g, or u
  misc_feature (339)..(339): n is a, c, g, or u
  misc_feature (345)..(345): n is a, c, g, or u
  misc_feature (351)..(351): n is a, c, g, or u
  misc_feature (357)..(357): n is a, c, g, or u
  misc_feature (366)..(366): n is a, c, g, or u
  misc_feature (369)..(369): n is a, c, g, or u
  misc_feature (390)..(390): n is a, c, g, or u
  misc_feature (402)..(402): n is a, c, g, or u
  misc_feature (405)..(405): n is a, c, g, or u
  misc_feature (408)..(408): n is a, c, g, or u
  misc_feature (414)..(414): n is a, c, g, or u
  misc_feature (426)..(426): n is a, c, g, or u
  misc_feature (432)..(432): n is a, c, g, or u
  misc_feature (435)..(435): n is a, c, g, or u
  misc_feature (438)..(438): n is a, c, g, or u
  misc_feature (444)..(444): n is a, c, g, or u
  misc_feature (453)..(453): n is a, c, g, or u
  misc_feature (459)..(459): n is a, c, g, or u
  misc_feature (480)..(480): n is a, c, g, or u
  misc_feature (489)..(489): n is a, c, g, or u
  misc_feature (492)..(492): n is a, c, g, or u
  misc_feature (501)..(501): n is a, c, g, or u
  misc_feature (519)..(519): n is a, c, g, or u
  misc_feature (528)..(528): n is a, c, g, or u
  misc_feature (540)..(540): n is a, c, g, or u
  misc_feature (558)..(558): n is a, c, g, or u
  misc_feature (567)..(567): n is a, c, g, or u
  misc_feature (582)..(582): n is a, c, g, or u
  misc_feature (600)..(600): n is a, c, g, or u
  misc_feature (603)..(603): n is a, c, g, or u
  misc_feature (606)..(606): n is a, c, g, or u
  misc_feature (612)..(612): n is a, c, g, or u
  misc_feature (615)..(615): n is a, c, g, or u
  misc_feature (636)..(636): n is a, c, g, or u
  misc_feature (639)..(639): n is a, c, g, or u
  misc_feature (645)..(645): n is a, c, g, or u
  misc_feature (651)..(651): n is a, c, g, or u
  misc_feature (654)..(654): n is a, c, g, or u
  misc_feature (657)..(657): n is a, c, g, or u
  misc_feature (660)..(660): n is a, c, g, or u
  misc_feature (663)..(663): n is a, c, g, or u
  misc_feature (666)..(666): n is a, c, g, or u
  misc_feature (681)..(681): n is a, c, g, or u
  misc_feature (684)..(684): n is a, c, g, or u
  misc_feature (687)..(687): n is a, c, g, or u
  misc_feature (693)..(693): n is a, c, g, or u
  misc_feature (696)..(696): n is a, c, g, or u
  misc_feature (699)..(699): n is a, c, g, or u
  misc_feature (702)..(702): n is a, c, g, or u
  misc_feature (711)..(711): n is a, c, g, or u
  misc_feature (723)..(723): n is a, c, g, or u
  misc_feature (735)..(735): n is a, c, g, or u
  misc_feature (738)..(738): n is a, c, g, or u
  misc_feature (741)..(741): n is a, c, g, or u
  misc_feature (750)..(750): n is a, c, g, or u
  misc_feature (753)..(753): n is a, c, g, or u
  misc_feature (756)..(756): n is a, c, g, or u
  misc_feature (759)..(759): n is a, c, g, or u
  misc_feature (762)..(762): n is a, c, g, or u
  misc_feature (768)..(768): n is a, c, g, or u
  misc_feature (771)..(771): n is a, c, g, or u
  misc_feature (774)..(774): n is a, c, g, or u
  misc_feature (786)..(786): n is a, c, g, or u
auggayuayaargaygaygaygayaargayuayaargaygaygaygayaargayuayaargaygaygaygayaarauggunwsnaarggngargaryunuuyacnggngungunccnauhyungungaryungayggngaygunaayggncayaaruuywsngunwsnggngarggngarggngaygcnacnuayggnaaryunacnyunaaruuyauhugyacnacnggnaaryunccngunccnuggccnacnyungunacnacnyunacnuayggnguncarugyuuywsnmgnuayccngaycayaugaarcarcaygayuuyuuyaarwsngcnaugccngarggnuayguncargarmgnacnauhuuyuuyaargaygayggnaayuayaaracnmgngcngargunaaruuygarggngayacnyungunaaymgnauhgaryunaarggnauhgayuuyaargargayggnaayauhyunggncayaaryungaruayaayuayaaywsncayaaygunuayauhauggcngayaarcaraaraayggnauhaargunaayuuyaarauhmgncayaayauhgargayggnwsnguncaryungcngaycayuaycarcaraayacnccnauhggngayggnccngunyunyunccngayaaycayuayyunwsnacncarwsngcnyunwsnaargayccnaaygaraarmgngaycayauggunyunyungaruuygunacngcngcnggnauhacnyunggnauggaygaryunuayaarurr

SEQ ID NO: 10 - DNA, 144 bp, Artificial Sequence
  Starting Seq
atggggggatcaggtgggtccggatatcagccgtacagagtcgttgtgctagggggaagcggaggtagtccctacagggtcgtcgtgctttcattcggcggatctgggggatccttaagcccccgctggtatttttactattaa

SEQ ID NO: 11 - DNA, 147 bp, artificial seqeunce
  Optimized Seq
atgggcggctcggggggctggggctaccagccctaccgggtcgtcgtcctcgggggctggggggggtgcccctacagggtcgtcgtgctgtcgttcggcggctctgggggcaccctcagcccccggtggtacttctactactggtaa

SEQ ID NO: 12 - DNA, 855 bp, Artificial Sequence
  Modified Open Reading Frame
atggtgagcaagggcgaggagctgttcaccggcgtggtgcccatcctggtggagctggacggcgatgtgaacggccacaagttctccgtgtccggcgagggcgagggggacgccacctacggcaagctgaccctgaagttcatctgcaccaccggcaagctgcctgtgccctggcctaccctggtgactaccctgacctacggggtgcagtgcttcagcaggtaccccgaccacatgaagcagcacgacttcttcaagtccgccatgcccgaggggtacgtgcaggagcgcaccatcttcttcaaggacgacgggaactacaagaccagggccgaggtgaagttcgagggcgacaccctggtgaaccggatcgagctgaaggggatcgacttcaaggaggacggcaacatcctggggcacaagctggagtacaactacaacagccacaacgtgtacatcatggctgacaagcagaagaacggcatcaaggtgaacttcaagatccggcacaacatcgaggacgggtccgtgcagctggcagaccactaccagcagaacacccctatcggggacggacccgtgctgctgcccgacaaccactacctgtccacccagagcgccctcagcaaggaccccaacgagaagcgcgaccacatggtgctgctggagttcgtgaccgccgccgggatcacactgggcatggacgagctgtacaagcggtcccgggacatctcccacggcttcccacccgccgtggccgcccaggacgacggcaccctgcccatgtcctgcgcacaggagagcgggatggaccggcaccccgccgcctgcgccagcgcccggatcaacgtgtaa

SEQ ID NO: 13 - DNA, 855 bp, Artificial Sequence
  Modified Open Reading Frame
atggtgagcaagggcgaggagctgttcaccggcgtggtgcccatcctggtggagctggacggcgacgtgaacggccacaagttcagcgtgtccggcgagggcgagggcgacgccacctacggcaagctgaccctgaagttcatctgcaccaccgggaagctgcccgtgccctggcccaccctggtgaccaccctgacctacggggtgcagtgcttcagcaggtaccccgaccacatgaagcagcacgacttcttcaagagcgccatgcccgagggctacgtgcaggagcgcaccatcttcttcaaggacgacgggaactacaagacccgcgccgaggtgaagttcgagggggacaccctggtgaaccggatcgagctgaaggggatcgacttcaaggaggacggcaacatcctggggcacaagctggagtacaactacaactcccacaacgtgtacatcatggccgacaagcagaagaacggcatcaaggtgaacttcaagatccggcacaacatcgaggacggcagcgtgcagctggccgaccactaccagcagaacacccccatcggcgacggccccgtgctgctgcccgacaaccactacctgagcacccagagcgccctgagcaaggaccccaacgagaagcgggaccacatggtgctgctggagttcgtgaccgccgccggcatcaccctgggcatggacgagctgtacaagcgctcccgggacatctcccacggcttcccacccgccgtggccgctcaggacgacggcaccctgcccatgtcctgcgctcaggagagcgggatggaccgccaccccgccgcctgcgcctccgcccggatcaacgtgtaa

SEQ ID NO: 14 - DNA, 855 bp, Artificial Sequence
  Modified Open Reading Frame
atggtgagcaagggcgaggaactgttcaccggcgtggtgcccatcctggtggagctcgacggcgacgtgaacggccacaagttcagcgtgtccggcgaaggcgagggcgacgccacctacggaaagctgaccctcaagttcatctgcaccaccggcaagctgcccgtgccctggcccaccctggtgaccaccctgacctacggcgtgcagtgtttcagcagataccccgaccacatgaagcagcacgatttcttcaagtccgccatgcccgagggctacgtgcaggagagaaccatcttcttcaaagacgacggcaactacaagaccagagccgaggtgaagttcgagggcgataccctggtcaacaggatcgagctgaagggcatcgatttcaaggaggacggcaacatcctgggacacaagctggagtataattataacagccacaacgtgtacatcatggccgacaagcagaagaacggcatcaaggtcaacttcaagatcagacacaacatcgaagacggcagcgtgcagctggccgaccactatcagcagaacacacccatcggcgacggccccgtgctgctgcccgacaaccactacctgagcacccagagcgccctgtccaaggaccccaacgagaagagagatcacatggtgctgctcgagttcgtgaccgccgccggcataaccctgggcatggacgagctgtacaagaggagcagagacatcagccacggctttcctcccgccgtggccgcacaggacgacggaaccctgcccatgtcctgcgctcaggagagcggcatggatagacaccccgccgcttgcgcctccgccagaatcaacgtgtaa

SEQ ID NO: 15 - DNA, 855 bp, Artificial Sequence
  Modified Open Reading Frame
atggtgtccaagggcgaggagctgttcaccggcgtggtgcctatcctggtggagctggacggcgacgtgaacggccacaagtttagcgtgtccggcgagggcgaaggcgacgccacctacggcaagctgaccctgaagttcatctgcaccaccggcaaactgcccgtgccctggcccaccctcgtgaccaccctgacctacggagtccagtgcttcagcagataccccgaccacatgaagcagcacgacttcttcaagtccgccatgcccgagggctacgtgcaggaaagaaccatcttctttaaggacgacggaaactataagaccagagccgaggtgaagttcgagggagacaccctggtgaacagaatcgagctgaagggcatcgacttcaaagaggacggcaacatcctgggccacaaactggagtacaactacaacagccacaacgtgtacatcatggccgacaaacagaagaacgggatcaaggtgaactttaagatcagacacaacatcgaagacggcagcgtgcagctcgccgaccactaccagcagaacacacccatcggcgacggacccgtgctgctgcccgacaaccattacctgagcacccagagcgccctgtccaaggaccctaacgagaagagagatcacatggtgctgctcgagttcgtgaccgccgccggcatcaccctgggcatggacgagctgtacaagagatcccgcgacatcagccacggctttcctcccgccgtggccgcccaagacgacgggaccctgcccatgagctgcgcccaggagtccggcatggacagacaccccgccgcctgtgccagcgccaggatcaacgtgtaa

SEQ ID NO: 16 - DNA, 855 bp, Artificial Sequence
  Modified Open Reading Frame
atggttagtaagggagaagaactgttcacaggcgtagtaccaatcctggtagaactggatggtgatgttaacggacataagttctcagtatctggtgaaggtgaaggtgacgctacatacggtaagctgacactgaagttcatctgtacaacaggaaagctgcctgttccttggcctactctggttacaactctgacatacggtgtacaatgtttcagtcgttacccggatcatatgaagcaacacgatttcttcaagtcagcaatgccagaagggtacgttcaagaaagaactatcttcttcaaggatgatggaaactacaagacaagggctgaagtaaagttcgagggtgatacactggttaacagaatcgaactgaagggaatcgatttcaaggaagatggtaacatcctgggtcataagctggaatacaactacaacagtcataacgtatacatcatggctgacaagcaaaagaacggaatcaaggtaaacttcaagatcagacataacatcgaagatggatctgtacaactggcagatcattaccaacaaaacacacctatcggtgatggtcctgtactgctgccagataaccattacctgtcaacacaatctgcactgagtaaggatccgaacgaaaagagagatcatatggtactgctggaattcgttacagctgcaggtatcacactgggaatggatgaactgtacaagcgctcaagagatatctcacatgggttcccaccagctgttgcagcacaagatgatggaactctgcctatgtcatgtgctcaagaatctggaatggatagacatccagctgcatgtgcgtctgcaagaatcaacgtttaa

SEQ ID NO: 17 - DNA, 855 bp, Artificial Sequence
  Modified Open Reading Frame
atggtttctaagggagaagaactgttcactggtgtagtacctatcctggtagaactggatggagatgttaacggccataagttcagtgtttctggagaaggagaaggtgatgctacttacggtaagctgacactgaagttcatctgtacaactggaaagctgccagttccttggcctacactggtaacaactctgacttacggagtacaatgtttctctcgatacccagatcatatgaagcaacatgatttcttcaagtcagcaatgcctgaaggttacgtacaagaaagaactatcttcttcaaggatgatggtaactacaagactagagctgaagtaaagttcgaaggagatactctggttaacagaatcgaactgaagggtatcgatttcaaggaagatggaaacatcctgggtcataagctggaatacaactacaactcacataacgtatacatcatggcagataagcaaaagaacggaatcaaggtaaacttcaagatcagacataacatcgaagatggttcagtacaactggcagatcattaccaacaaaacacacctatcggagatggacctgtactgctgccagataaccattacctgtcaactcaatctgcactgtcaaaggatcctaacgaaaagagagatcatatggtactgctggaattcgtaacagctgcaggaatcactctgggtatggatgaactgtacaagagaagtagagatatctctcatggtttcccacctgctgtagctgcacaagatgatggtacactgcctatgagttgtgctcaagaatctggaatggatagacatcctgcagcttgtgcatcagcaagaatcaacgtataa

SEQ ID NO: 18 - DNA, 855 bp, Artificial Sequence
  Modified Open Reading Frame
atggtgtcgaagggagaggagctcttcaccggggtggtgcccatcctggtggagctggacggggatgtgaacgggcacaaattctcggtgtccggcgagggcgagggtgatgccacgtacgggaagctcaccctgaagttcatatgtacgacagggaagcttcccgtgccctggcccaccctcgtgaccaccctgacgtatggggtgcagtgcttcagcaggtaccccgaccatatgaagcagcacgacttcttcaagtcagccatgcccgaggggtacgtgcaggagcgcaccatcttcttcaaggacgatgggaactacaagacccgcgccgaggtgaagttcgagggcgataccctggtgaaccggatcgaattgaaggggatcgacttcaaggaggatggaaacatccttggccataagctggagtacaactataactcccacaacgtgtacattatggccgataagcaaaagaacggcatcaaggttaactttaagatccggcacaacatcgaggacggcagcgtacagctggccgaccactatcagcagaacacaccgatcggcgacgggcccgttctcttgccggacaaccactacctgtccacccagagcgccctcagcaaggacccgaacgagaagcgggaccacatggtcctgctggagttcgtcactgccgccgggatcaccctcggcatggacgagctctacaagaggtcccgggacatctcgcacgggtttccacccgccgtggcggcacaggacgacggcactctgccgatgtcctgcgcgcaggagagcgggatggaccgccatcccgctgcctgcgcatccgcccggatcaacgtgtaa

SEQ ID NO: 19 - DNA, 855 bp, Artificial Sequence
  Modified Open Reading Frame
atggtgtccaagggcgaggagctattcaccggcgtggtgcccatcctggtggagctggatggcgacgtgaacggacacaagttctcggtgtccggcgagggtgagggcgacgccacatacggcaagctcaccctcaagtttatctgcaccaccgggaagctccccgtcccttggcccaccttggtgaccaccctgacctacggggtgcagtgcttctcgcggtaccccgatcacatgaagcagcatgacttcttcaagtccgccatgccggaggggtacgtccaggagcgcaccatcttctttaaggacgatgggaactataagacccgcgccgaggttaagttcgagggtgacaccctcgtgaaccggatcgagctgaaggggatagacttcaaggaggatggcaacatcctggggcacaagctggagtacaattataactcccataatgtgtacatcatggccgacaagcagaagaacggcatcaaggtgaacttcaagatccggcacaacatcgaggacggctcggttcagctggcagaccactaccagcagaacaccccgatcggggacgggcccgtgctcctgcccgacaatcactacctgtcgacccagagcgctctgtcgaaggatcccaacgagaagcgggaccacatggtcctgctggagttcgttactgccgcagggatcaccctgggcatggacgaactctacaagcgctctcgggacatcagccacggcttccctccggccgtggctgcacaggacgacggcacactgccgatgtcctgtgcgcaggaaagcgggatggatcgccatcccgctgcctgcgcctcggcgcggatcaacgtgtaa

SEQ ID NO: 20 - DNA, 855 bp, Artificial Sequence
  Modified Open Reading Frame
atggtgagcaagggagaggagctcttcaccggcgtggtgcccatcctggtggagctggacggtgacgtgaacggtcacaagttcagcgtctccggggagggcgagggtgacgccacgtacgggaagctgaccctgaagttcatctgcactacagggaagcttcccgtgccgtggcccaccctcgtcacgaccctgacctacggggtacaatgcttcagcaggtaccccgatcatatgaagcagcacgacttcttcaagtcagcgatgcccgaggggtacgtgcaggagcgcacgatcttcttcaaggacgacgggaactataaaacccgcgccgaggtgaagttcgagggcgacactctggtgaaccggatcgagctgaaggggatcgacttcaaggaggatggcaacatcctcgggcacaaactggagtacaactacaactctcacaacgtgtacatcatggccgacaagcaaaagaacggcatcaaagtaaacttcaagatccggcataacatcgaggacggcagcgtgcagctggccgaccactatcagcagaacaccccgataggggatggccctgtgctgctgccagacaatcattacctgtcgacccagagcgccctgagcaaagacccgaacgagaagcgggaccacatggtcctgctcgagttcgtgactgccgcgggcatcaccctcggcatggacgaactctacaagcgctcgcgggacataagccatggcttcccgccggccgtggccgctcaggacgacggcacgctgccgatgtcctgcgcgcaggagagcgggatggaccgccatcccgctgcctgcgcgtcagcacggatcaacgtgtaa

SEQ ID NO: 21 - DNA, 855 bp, Artificial Sequence
  Modified Open Reading Frame
atggtgagcaagggcgaggagctgttcaccggcgtggtccccatcctggtggagctggatggggacgtgaacggtcacaagttctcggtctccggggagggcgagggcgatgcaacatacgggaagctcaccctgaagttcatatgcactacggggaagctgcccgtgccctggcccaccctggtgaccaccctgacctatggggtccagtgcttcagcaggtaccccgatcacatgaagcagcatgacttctttaagtctgccatgcctgaggggtacgtgcaggagcgcacgatcttcttcaaggacgacgggaactataagaccagggccgaggtcaagttcgagggcgacaccctcgtgaaccggatcgaactgaaggggatcgatttcaaggaggatggcaacatcctggggcacaagttggagtacaactacaacagccataacgtgtacatcatggctgacaagcagaagaacggcatcaaggtcaacttcaagatccggcacaacattgaggacggtagcgttcagctggcagatcactaccagcagaacaccccgatcggggacgggcccgtgctgctgccggacaatcactacctgtccacccagagcgccctgtcaaaggaccccaatgagaagcgggaccacatggtcctgctagagttcgtcacagccgcaggcataaccctgggcatggacgaactctacaagcgctcccgggacatcagccacggcttcccaccagccgtggctgcgcaggacgacggcactctgccgatgtcctgcgctcaggagagcgggatggaccgccatcccgctgcctgcgcgtcagcccggatcaacgtgtaa

SEQ ID NO: 22 - DNA, 855 bp, Artificial Sequence; identical to SEQ ID NO: 12
  Modified Open Reading Frame

SEQ ID NO: 23 - DNA, 855 bp, Artificial Sequence; identical to SEQ ID NO: 13
  Modified Open Reading Frame

SEQ ID NO: 24 - DNA, 855 bp, Artificial Sequence; identical to SEQ ID NO: 14
  Modified Open Reading Frame

SEQ ID NO: 25 - DNA, 855 bp, Artificial Sequence; identical to SEQ ID NO: 15
  Modified Open Reading Frame

SEQ ID NO: 26 - DNA, 855 bp, Artificial Sequence; identical to SEQ ID NO: 16
  Modified Open Reading Frame

SEQ ID NO: 27 - DNA, 855 bp, Artificial Sequence; identical to SEQ ID NO: 12
  Modified Open Reading Frame

SEQ ID NO: 28 - DNA, 855 bp, Artificial Sequence; identical to SEQ ID NO: 13
  Modified Open Reading Frame

SEQ ID NO: 29 - DNA, 855 bp, Artificial Sequence; identical to SEQ ID NO: 14
  Modified Open Reading Frame

SEQ ID NO: 30 - DNA, 855 bp, Artificial Sequence; identical to SEQ ID NO: 15
  Modified Open Reading Frame

SEQ ID NO: 31 - DNA, 855 bp, Artificial Sequence; identical to SEQ ID NO: 16
  Modified Open Reading Frame

SEQ ID NO: 32 - DNA, 855 bp, Artificial Sequence; identical to SEQ ID NO: 17
  Modified Open Reading Frame

SEQ ID NO: 33 - DNA, 855 bp, Artificial Sequence; identical to SEQ ID NO: 18
  Modified Open Reading Frame

SEQ ID NO: 34 - DNA, 855 bp, Artificial Sequence; identical to SEQ ID NO: 19
  Modified Open Reading Frame

SEQ ID NO: 35 - DNA, 855 bp, Artificial Sequence; identical to SEQ ID NO: 20
  Modified Open Reading Frame

SEQ ID NO: 36 - DNA, 855 bp, Artificial Sequence; identical to SEQ ID NO: 21
  Modified Open Reading Frame

SEQ ID NO: 37 - DNA, 855 bp, Artificial Sequence
  Modified Open Reading Frame
atggtgtccaaaggtgaggagttgttcacgggcgtcgtcccaattcttgtagaattggacggcgacgtgaacggtcacaagttctccgtgtcgggcgagggcgaaggtgacgccacctacgggaagcttaccctgaagtttatttgcactacagggaagcttcccgtgccctggcccacactagtgaccactctcacctacggagtccagtgcttcagcaggtacccggaccacatgaagcagcatgacttcttcaagtccgccatgcctgaaggatatgttcaagaacgaacaatattcttcaaggatgacgggaactacaagacccgcgctgaggtcaagtttgagggcgatacccttgtgaatcgcatcgagctcaagggtatcgacttcaaagaggatggcaacatcctcgggcataagttggagtacaactacaactcccacaatgtgtacatcatggcggacaagcagaagaatgggatcaaggttaacttcaagatccggcataatattgaggacggatccgtccagcttgctgatcattatcagcaaaacactccgatcggagacggtcctgttctgctgcctgacaatcactacctgagtactcagtcagcactgagcaaggacccgaacgagaagcgggaccatatggtccttctcgagtttgtgaccgcagccgggatcaccctagggatggatgaactatataagcgctcccgggatatatcccatggattcccgcctgcggtcgcagctcaagacgatgggacccttcccatgtcttgcgcacaagagagcgggatggatcgccatccggccgcttgtgcgtcggcgcgtataaacgtctaa

SEQ ID NO: 38 - DNA, 855 bp, Artificial Sequence
  Modified Open Reading Frame
atggtgtcgaaaggtgaggagttgttcacaggagtggttcccattctcgtcgagctcgacggcgacgtgaacggacacaagtttagtgtgtccggtgagggagaaggcgatgccacatatggcaagctaaccctgaagtttatatgcactacagggaagctgccggtcccgtggccgaccttggtcacgacattgacctatggcgtgcaatgcttcagccggtatccggaccacatgaagcagcacgacttcttcaagagcgcgatgcccgagggctatgtgcaagagcgcaccatcttctttaaagatgacgggaactataagacccgtgcggaagttaagttcgagggtgacaccctcgttaaccgcatcgagctcaagggcatcgacttcaaagaggatgggaacatcctcggccataagctggagtataattataactcccataatgtttatattatggccgacaaacagaagaatgggatcaaggtcaactttaagatacgccataacatagaggatggcagtgtccagttggccgatcattaccaacaaaacacgccaatcggcgacgggccggtgcttctccctgacaaccactacctcagcacgcaaagcgcgctgagcaaggacccgaatgagaagcgtgaccatatggtcctgcttgagttcgtgaccgctgcaggcatcactctcgggatggatgaactgtataagcggtcacgagacatctcacacgggttcccgccagcagtggcggcgcaggacgacggcacactgccgatgtcctgcgcacaggaaagcgggatggaccgccatcccgctgcctgtgcgagcgcgcgcatcaacgtgtaa

SEQ ID NO: 39 - DNA, 855 bp, Artificial Sequence
  Modified Open Reading Frame
atggtgtctaaaggtgaagagctcttcaccggcgtcgtccctatcctcgtagagctggatggcgacgtgaacggccataagttctccgtctcgggcgagggtgagggcgacgccacgtatggcaaattgacattgaagttcatatgtactactgggaagctcccagtaccttggcccacactagtcaccacgttaacgtatggtgtccagtgctttagtcgatacccggaccacatgaagcaacatgacttcttcaagtccgccatgcccgaagggtacgttcaagaacgtaccatcttctttaaggatgatggcaattacaaaacgcgggcagaggttaagttcgagggcgataccctcgttaatcgtatcgagctgaagggtatcgactttaaggaggatgggaacatcctcgggcataagctcgagtataattacaatagccataatgtatacatcatggcggacaagcagaagaatgggatcaaggtaaacttcaagatccggcacaacatagaggacgggtccgtgcaactcgcggaccattatcagcagaatacacctattggtgacggccctgtgttgttgccggataatcattacctgagcactcagagtgctctttcgaaggatcccaacgagaagcgggaccatatggtcctgctagaatttgtgacggcggcgggcatcaccctgggcatggatgagctgtacaagcggtcgcgcgacattagccacggctttccaccagccgtggcagcgcaggacgatggtaccttaccaatgtcctgcgctcaggagagcggcatggaccgccatccggccgcctgcgcgtcggccaggataaatgtctaa

SEQ ID NO: 40 - DNA, 855 bp, Artificial Sequence
  Modified Open Reading Frame
atggtatcaaagggcgaagagctctttaccggtgtcgtcccgattctcgtcgagctcgacggagacgtgaacggtcacaaattctccgtgagtggcgagggcgagggcgacgctacgtacgggaagctcacactgaagtttatctgcactacaggtaaacttccagtgccgtggcctacgctggtgaccacgctgacctacggtgtccagtgtttctctcgctatccggaccacatgaagcagcacgacttcttcaagtcggctatgcctgagggctacgtccaggagaggaccatcttcttcaaggacgatgggaactacaagacccgtgccgaggtcaagtttgagggcgataccctagtgaatcggatcgagctaaagggtatcgacttcaaagaggatgggaacatcctcggccacaagctggagtataactataactcccacaatgtgtatattatggcagataaacagaagaacggcatcaaggtcaacttcaaaatcaggcacaacatcgaagatgggtctgttcagctggctgaccactaccagcaaaacacacccatcggcgatggcccggtgttgttgcctgataaccattatctcagcactcagagcgcgctgagtaaggatcctaacgagaagcgggaccatatggtcctgcttgagtttgttacagctgcgggaattacgctcggcatggacgagctgtataaacgcagccgtgacattagccacgggttccctccggccgtggctgcacaggacgatgggacactcccaatgtcctgtgcacaggaatccgggatggatagacatcccgcggcctgcgcctcggcgaggatcaacgtgtaa

SEQ ID NO: 41 - DNA, 855 bp, Artificial Sequence
  Modified Open Reading Frame
atggtgtctaagggagaggaactcttcactggcgtcgtccctatcctggtggaactggacggagacgtgaacggtcacaagttctccgtctccggagagggcgagggagacgccacgtacgggaagttgacccttaagttcatatgcactacagggaagttgcccgtgccttggcccactctggtgacgactctcacctatggagtgcagtgtttctcacgctatccggatcatatgaagcagcacgacttcttcaagtcggctatgcccgaagggtatgttcaagaacgaaccatcttctttaaagatgatgggaattataagacgagggccgaggtaaaattcgagggcgataccctggtaaatcgcattgagcttaagggtatcgacttcaaggaggacggcaacatattgggacataagttggagtataattataactcccataacgtctacattatggccgacaagcagaagaacggcatcaaggtcaacttcaagatccgccacaatatcgaggacgggtccgttcagctggcagatcactaccagcagaacacacctataggtgatggaccggtgctcctgccagataatcactatctgtctacgcagagtgccctgtccaaggacccgaatgagaagcgtgaccatatggtgctgctcgagttcgtcacggcggccgggataaccctgggtatggatgagctctacaagagaagtagagacatctcccatgggtttccaccggccgtcgcggcgcaggacgatggcacgttgccaatgtcctgcgcccaggagagcgggatggaccgccatcccgctgcctgcgcctctgctagaattaacgtttaa

SEQ ID NO: 42 - DNA, 855 bp, Artificial Sequence
  Modified Open Reading Frame
atggtgtctaaaggtgaagagctcttcacaggagttgtgccaattcttgtggagctcgacggcgacgtcaatggccataagttcagcgtgtcaggtgagggcgagggagacgcgacgtacgggaagcttaccctgaagttcatatgtactacagggaagctacccgttccctggccaacacttgtcaccacgctaacttatggcgtgcaatgcttcagccgatacccggatcacatgaagcagcacgacttctttaaaagtgctatgcccgagggctacgtccaggagaggaccatattcttcaaggacgacgggaattacaagacccgggccgaagtcaagttcgagggtgacacgttggtcaaccgaatcgagctcaagggcatagactttaaagaggatggaaacatcctcggccataagctggaatacaactataacagccataatgtatacatcatggctgataaacagaagaacggcattaaagtgaactttaagatccgccataacatagaggacggctctgtgcagctggcggatcactaccagcagaacacgccgatcggcgacgggcccgtgttgctcccagataaccattatctgagcactcagagtgctctctccaaggaccctaatgagaagagggaccacatggtcctgctggaattcgtcacggcagcagggataaccctgggtatggacgaattatacaagaggtcccgtgacatcagtcacgggttccctcctgccgtggcggcgcaggacgatggcacgctgccaatgtcctgcgcgcaagaaagcgggatggatcgccacccggcggcttgcgcaagcgctagaattaacgtgtaa

SEQ ID NO: 43 - DNA, 855 bp, Artificial Sequence
  Modified Open Reading Frame
atggtgtccaagggcgaggagctcttcaccggcgtggtgccaattctagtcgagctcgacggagatgtgaatggccataagttcagcgtctccggcgagggcgaaggagacgctacttatggcaagctcacattgaagttcatttgcaccactggcaaactgccagtgccttggcccacgctggtgacgactctcacgtatggagtccaatgcttcagtcgctatcccgaccatatgaagcagcacgacttctttaagtcggcaatgcccgagggctatgtccaagaacggactatcttcttcaaagatgatgggaactacaagaccagagctgaggtcaaatttgaaggagataccctggtgaacaggatagaactaaagggcattgactttaaggaggacggcaacatactcggccataagttggagtacaactataactcccacaacgtgtacattatggccgacaagcagaagaatggtatcaaggtgaatttcaagattcgccataatatcgaagatgggagtgttcagttggcagaccactaccaacagaacacgcccatcggtgacggtcccgtgctccttccagacaaccattaccttagtacacagagcgctctgtctaaggatccgaacgagaaaagggatcatatggttcttctggaattcgtgacagctgcgggaataacccttgggatggatgagctctacaagcggagccgggacatctctcatgggttcccgccagctgtcgcggcgcaggacgatggaacccttcctatgtcctgcgcccaggagtcgggcatggaccgtcatcccgcggcgtgcgcgagtgcgcggatcaacgtgtaa

SEQ ID NO: 44 - DNA, 855 bp, Artificial Sequence
  Modified Open Reading Frame
atggtgtcgaagggtgaggagctgttcacgggtgtggtgcccatcctcgtcgagctcgacggagatgtgaacggtcacaaattctccgtgtccggtgagggcgagggcgatgccacgtacggcaagcttaccttgaagttcatctgcacgacaggcaagctgcctgtcccttggcccaccctggttacaacccttacgtatggcgtgcaatgcttcagtcggtacccagaccacatgaagcagcacgatttcttcaaatcggccatgccggaagggtatgtacaggagaggaccatcttcttcaaggatgatggtaactacaagaccagggcggaggtcaagtttgagggcgataccctggttaacaggatcgaactgaagggtatcgacttcaaggaggatgggaacattctgggccacaagctggagtacaactacaacagccataatgtatacattatggctgataagcaaaagaacggcatcaaggtgaacttcaagattcggcacaatatcgaggatggtagcgtccagctggcggaccactaccagcagaacactccaataggagacgggcccgttctgcttccggacaaccactacctgtccacacagtcagccctcagcaaggacccgaatgagaagcgagaccatatggtcttgctagaatttgtgaccgctgctggcatcacactcgggatggacgagctgtataagcgtagccgcgatatcagccacggcttcccgccggccgtggcggcgcaagacgatggtacgttacccatgtcttgcgcccaggagtcagggatggatcgccaccctgcggcgtgtgcgtcagcgcggatcaacgtgtaa

SEQ ID NO: 45 - DNA, 855 bp, Artificial Sequence
  Modified Open Reading Frame
atggtcagcaagggagaagagctcttcacgggcgtggtacccattctcgtagaattggacggtgatgtcaacgggcataagttcagcgtgagcggcgagggtgaaggcgacgccacgtacgggaagcttaccctgaagtttatatgtactacaggtaagcttccagtaccgtggcctactctggtcaccactctcacgtacggagtccaatgcttcagcagatacccggaccacatgaagcagcacgacttcttcaagtccgcgatgcctgaaggatacgttcaggagcggactatcttcttcaaggatgacgggaactataagacgcgtgctgaggtaaagttcgaaggtgatactctcgtcaacaggatcgagttgaagggtatcgacttcaaggaggatggcaacatcctcgggcacaagttggagtacaattataactctcacaacgtgtacatcatggcagacaagcagaagaacggaattaaggtgaatttcaaaattcgtcacaacatcgaggacggatccgtccaactcgccgatcactaccaacagaatacgccgatcggcgatggacccgttcttctgccagataaccattacctcagcacgcagtcggctctgtccaaagatcctaatgagaagagagaccacatggtcttgctggagtttgtgacggccgccgggatcaccctgggcatggacgagctgtacaagcggtcccgtgacatcagccatgggttcccgccggccgtcgcggctcaggacgacggtactctgccgatgagttgtgctcaggagagtggtatggaccggcaccctgccgcttgcgctagtgcccgcatcaacgtctaa

SEQ ID NO: 46 - DNA, 855 bp, Artificial Sequence
  Modified Open Reading Frame
atggtgtccaagggagaggagctgttcaccggtgtggtccctatcctcgttgagctggacggtgatgtcaatggccataagtttagcgtctctggcgagggtgagggagatgccacgtatggcaagttaactctcaagtttatttgcacaactggcaagctccctgtgccatggcccaccctcgtcacgacgctgacttatggtgtccagtgcttcagccggtatccggaccacatgaagcagcacgacttctttaagtcggcgatgcctgagggctatgtccaggagaggaccatcttctttaaagatgatggtaactacaagaccagggccgaagtgaaattcgaaggcgacaccctggtcaaccggatcgagctcaagggcatcgactttaaggaagacgggaacatactgggccacaagctggagtacaactataatagccataatgtatacattatggcggacaagcagaagaacggcataaaagtcaacttcaagatccgtcacaatatcgaggacgggtcagtccagctggctgaccactaccagcagaatacgccgatcggcgatggcccggtgttacttcccgacaatcactaccttagtactcagagtgctctctccaaagatcccaacgagaaaagggaccacatggtgctcctcgagtttgtgacggcggccggcattactcttggcatggatgagctctacaagcgatctagagacatcagccacggcttcccaccagccgtggctgcgcaggacgatgggacgcttcccatgtcctgcgcgcaggagagcggtatggaccgccatccggccgcttgcgcaagcgctagaattaacgtataa

SEQ ID NO: 47 - DNA, 855 bp, Artificial Sequence
  Modified Open Reading Frame
atggttagcaaaggcgaagaattatttacaggagttgtaccaatattagttgaacttgacggagatgttaacgggcataaatttagcgtgagtggtgaaggagaaggcgatgcaacatacggaaaattgactttaaaatttatttgtacaaccggaaaactaccagtaccttggccgactttagtaactactttaacctatggcgtacaatgtttctcacgttacccagaccatatgaaacaacacgatttctttaaatcagcaatgccagaaggatacgtacaagagaggacaatattctttaaagatgatggaaattataaaacgagagctgaagtaaaatttgaaggcgacacattagtaaacagaatagaattaaaaggaatagactttaaagaggacggaaatattcttggacacaaattagaatataactacaattcacataacgtatatataatggcagacaaacagaagaacgggattaaagtaaactttaaaataagacataacattgaagatgggagcgttcaactggcagatcattatcaacaaaacacaccaataggcgatggaccagtactactacctgacaaccattatttatccacacagagcgcattaagtaaagacccaaacgaaaagagagatcacatggtactactggaatttgtaacagctgcaggcataacattaggaatggacgaactatataaacgaagtagagacatatcacacggattcccaccagcagtagcagcacaagatgatggaacactacctatgagttgcgctcaagaatctggcatggaccgccaccctgctgcatgtgcatctgcaaggataaatgtataa

SEQ ID NO: 48 - DNA, 855 bp, Artificial Sequence
  Modified Open Reading Frame
atggtttcaaaaggagaagaattatttacaggtgtagtaccgatcttagtggaactggatggagatgttaacggtcataaatttagtgtaagcggagaaggtgaaggagatgctacttatggaaaactgactttaaaatttatatgcacgactggaaaactacctgtaccctggcctacccttgtaacaaccctgacatacggagttcaatgctttagccgttacccagatcatatgaaacaacacgatttctttaagtctgcaatgcccgaaggttatgtacaagaacgcactatattctttaaagacgacggtaattataaaacaagagctgaagtaaaatttgaaggagacacattggtaaatagaatagaattaaaaggaattgatttcaaagaagacggaaatatactaggacacaaattggaatacaactataatagtcataatgtgtatataatggcagacaaacaaaagaacggaataaaagtaaatttcaagataagacacaatatagaagatggaagcgtccaattagcagatcattaccaacaaaacacaccaataggagatggcccagtcttattacccgacaatcattatctatcaacccaaagcgccctatcaaaagatcctaacgaaaagagagatcatatggttctgttagaatttgtgactgccgcaggaataactttaggtatggatgaattatacaaacgtagtcgagatatttcacatggatttccacccgctgttgctgcccaagatgatggaactctaccaatgtcatgtgctcaagaatctggaatggatcgacatcctgctgcctgtgcatctgcccgaatcaacgtctaa

SEQ ID NO: 49 - DNA, 855 bp, Artificial Sequence
  Modified Open Reading Frame
atggtaagcaaaggagaagagctatttacaggagttgtaccgatactagttgaattagatggagatgtgaatggacataaatttagtgtgagtggagaaggagaaggagacgcgacatatggaaaattaacgttaaaatttatatgcacaacaggaaaattgcccgtaccttggccaacattagtgacaactttaacatacggcgttcaatgctttagcagatatcccgatcatatgaaacaacacgatttctttaagagtgccatgccagaaggttatgtacaagaacgaacaatattctttaaggacgatggaaattataagacgagggcagaggttaaatttgaaggcgacacgttggtaaatagaattgaattaaaagggattgactttaaagaagacggaaatatactgggccataaactcgaatacaactacaacagccacaacgtatatattatggcagataaacaaaagaacggtattaaagtaaatttcaaaatcaggcacaatatagaagatggcagcgttcaattggcagatcattatcaacaaaacacacctatcggagacggacccgtattattaccagacaatcactacctatctacacaatctgcgttaagtaaagacccgaatgagaaaagagaccacatggtactattagagtttgtgactgcagccggtataactttaggaatggatgaactatataaaagaagtagagatatatcacacggcttcccaccagctgttgctgcccaagacgacggaacactacctatgagctgtgcacaagaaagtggaatggatagacaccctgcagcatgcgcttccgcccgtattaatgtataa

SEQ ID NO: 50 - DNA, 855 bp, Artificial Sequence
  Modified Open Reading Frame
atggtaagcaaaggagaggaattatttacaggcgtggtacctattcttgtagagttagatggagatgtgaacggacataaatttagtgtatctggtgaaggagaaggtgatgcaacttatggaaaattgactttgaaatttatatgtacaacaggaaagctaccagttccatggccaacattagtgacaactttaacttacggcgtacaatgcttctcacgatatcctgaccacatgaaacaacacgatttctttaaaagcgcaatgccagaaggttatgtccaagaacgcaccatattctttaaagacgacggcaattataaaacaagagcagaggtaaaatttgaaggagatacacttgtaaatagaatcgaattgaaaggaatagactttaaggaagacggaaacatattaggtcataagcttgaatataattacaacagtcacaacgtatatataatggcagacaaacagaagaacggaattaaagtaaactttaaaatcagacacaacatagaagacgggagcgtacaattagcagaccattaccaacaaaacacacctatcggagacggaccagtattattaccagacaaccattacctatcaacacaaagtgccctatcaaaagacccaaacgaaaagcgagatcatatggtattattagaatttgtcaccgcagcaggaataacacttggaatggatgaactgtataagagaagcagagatataagtcatggtttcccgccagccgtagcagcacaggatgacggaactctaccaatgtcatgcgcacaggaatctggaatggaccgacaccctgcagcctgcgcctcagcccgcattaatgtttaa

SEQ ID NO: 51 - DNA, 855 bp, Artificial Sequence
  Modified Open Reading Frame
atggtaagcaaaggcgaagagttgtttacaggagttgtacctatactagttgaattggatggagatgttaatggtcacaagtttagcgtgtctggtgaaggagaaggcgatgcaacatatggaaaactgacgctaaaatttatttgtaccaccggcaaactacctgtaccttggcctactttagttacaaccctgacatacggagttcaatgtttctctagataccctgaccacatgaaacaacacgacttctttaaaagtgccatgccagaaggatacgtacaagagagaaccatattctttaaagacgacggaaattataagacgagagcagaagttaaatttgaaggagatacactggtaaatagaattgaattaaaagggatagatttcaaagaggatggaaatatattaggacacaaattagaatacaattacaattcgcataacgtttacataatggcagataaacaaaagaatggcataaaagttaactttaaaattagacacaatatagaagatggaagcgtacaattagcagaccactaccaacaaaatacaccaattggagacgggcctgtgttactccctgataaccattacctttcaacccaatcagccctatcaaaagatccgaacgagaaaagagatcacatggtcttgttggaattcgtaacagccgccggaataactttaggaatggatgaattatataagcgctcgagagatattagtcatggatttccacccgctgtagctgcacaagatgacggaacactacctatgagttgcgcacaagaatcaggaatggatagacacccagcagcatgtgccagcgcccgaataaatgtttaa

SEQ ID NO: 52 - DNA, 855 bp, Artificial Sequence
  Modified Open Reading Frame
atggtttctaaaggcgaagaattatttacaggagttgtacctatacttgttgaattagatggagatgtaaatggtcacaaatttagcgtttcaggagaaggcgaaggcgatgctacatacggaaaacttactttaaaattcatttgcacaactggaaaactacctgtcccatggcccaccttagtaaccacgcttacatacggagtacaatgcttcagccgatatcccgaccacatgaaacaacacgatttctttaaaagcgcaatgcccgaaggttatgtacaagagcgcacgatattctttaaagatgacggaaattataagacacgagcagaggtaaaatttgaaggagatacactggtcaatagaatagaattaaaaggcatagatttcaaagaagacggtaatattcttggacacaaattagaatacaattataactctcacaacgtttacataatggcagataaacaaaagaatggaatcaaagtgaatttcaaaattagacataacatagaagacggttctgtacaacttgctgatcactaccaacaaaatacaccaataggagacggaccggtactgcttcccgataaccattacctaagcacccaatcagccctatccaaagatcccaatgagaaaagagaccacatggtattacttgaatttgttactgcagcgggcattactttaggcatggatgaactttacaaacgctcaagagacatatcacacggatttccacctgcagtcgcagcccaagacgacggaacgttaccaatgtcatgcgcacaagaatcaggaatggatagacatcccgcagcatgtgcaagtgcccggataaatgtataa

SEQ ID NO: 53 - DNA, 855 bp, Artificial Sequence
  Modified Open Reading Frame
atggtttcgaaaggagaagaattatttactggcgttgtacccatacttgtagaactagacggtgatgttaacggacataaatttagtgtatctggcgaaggcgaaggagacgcaacatacggaaaattaacattaaaattcatttgtactactggaaaactacctgtcccttggccaactttagtaaccacattgacatacggagttcaatgctttagtagatatcccgaccacatgaaacaacacgatttctttaaatcagcaatgccagaaggctacgtacaggaaagaacgatattcttcaaagacgatggaaattataagacacgagcggaagttaaatttgaaggagatacattggtgaatagaatagaattgaaaggaatagactttaaagaagacggaaacatcttaggacacaagctagaatataattataactcacataacgtttacataatggccgataaacaaaagaatgggattaaagttaacttcaagatacgacataatatagaagacggttcagtacaactcgccgatcattaccagcaaaatacaccaattggagacggacccgtactattacccgacaaccactacttatctacacaatcagcccttagcaaagacccaaacgagaaacgcgatcacatggtattattagaatttgtaaccgccgcaggaatcactcttggaatggatgaattatataaacgctcacgagatataagtcacggatttccaccagcagtcgccgcacaagatgatggaacgctaccgatgagttgtgcccaagaaagtggaatggaccgacatcccgccgcatgcgcctctgcacgcataaatgtataa

SEQ ID NO: 54 - DNA, 855 bp, Artificial Sequence
  Modified Open Reading Frame
atggtaagtaaaggagaagaattattcacaggagtagtacctatattagtagaacttgatggagatgtaaacggtcataaattcagtgttagcggagaaggagaaggagatgcaacttatggtaaattaacgttaaagtttatatgcacaacaggcaaactacccgttccatggccaacattagtcacaactctcacatacggtgtacaatgctttagtcgctatccagatcacatgaagcaacacgatttctttaaaagcgctatgccagaaggatatgtccaagaacgcacaatcttctttaaagacgacggtaattataaaacaagagcagaggtgaaattcgagggtgacacattagtgaatagaatagaattaaaagggatagatttcaaagaagacggcaacattctaggtcataaattagagtataactacaattcacataacgtatacataatggcggacaaacaaaagaatgggataaaagtaaactttaagattagacacaatatagaagacggatcagtacagctagccgatcattatcaacaaaatacacccataggagacggcccagtattattaccagacaatcattacttatcaacacaaagcgcattatccaaagatccgaacgaaaagagagaccacatggttctattagaatttgtaaccgccgcaggaataacattaggaatggacgaattatataaacgatcgagggacatatcacacgggtttccaccagccgtagcagctcaagacgacggaactctaccaatgtcatgtgcacaagaatcaggaatggatagacacccggctgcatgtgcaagtgcaagaatcaatgtttaa

SEQ ID NO: 55 - DNA, 855 bp, Artificial Sequence
  Modified Open Reading Frame
atggttagcaaaggagaagaattatttactggagtagttccaatacttgtagaacttgatggcgatgtaaatggacacaaatttagcgtaagcggcgaaggcgaaggagatgcaacatatggaaaactcactctcaaattcatttgcacaaccggaaaattacctgttccatggcctacactcgttacaacactaacctatggcgttcaatgcttctcacgatacccagaccatatgaaacaacatgatttctttaaaagtgcaatgcctgaaggatatgtgcaagaaagaacgatattctttaaagacgacggaaactataaaactcgagctgaagtgaaattcgaaggagatacgttggttaatagaattgagctaaaaggtatagatttcaaagaagacggtaacattcttggtcacaaacttgaatataattataactcccacaacgtgtacatcatggcagacaaacaaaagaacggaataaaagtaaactttaaaataagacataacatagaagacggaagtgtacaacttgcagaccattaccagcaaaatactccaatcggtgacggcccagtactcctcccagacaaccattatttatcaacacaatccgcattaagcaaagacccaaacgaaaagcgcgatcatatggtattattagaattcgtaactgcggcaggtataacattaggaatggatgaattatataaaagatcaagagatataagccacggatttccaccagcagttgcagcacaagatgatggtaccttaccaatgagttgcgcacaagaatccggaatggatcgacaccctgctgcatgtgcttccgcccgtatcaacgtttaa

SEQ ID NO: 56 - DNA, 855 bp, Artificial Sequence
  Modified Open Reading Frame
atggtgagcaaaggagaagagctatttaccggagtcgtacctatacttgttgagttagatggcgatgttaatggtcacaaatttagtgtttcgggcgaaggcgaaggcgacgcaacttacggaaaactcacactcaaatttatatgcactactggaaaattacctgttccatggccaacacttgtaactacgctgacctacggagtacaatgctttagccgatatcctgaccacatgaaacaacacgatttctttaaatcagctatgccagaaggatatgtgcaagaacggactatattctttaaagatgacggaaattataaaacacgagcggaagttaaatttgaaggtgatacattagtgaaccgaatagaattaaaaggaatagatttcaaagaagacggtaacatactaggacacaaactggaatacaactacaactcacacaacgtatacattatggccgataagcagaagaatggcattaaagtaaatttcaagattagacacaacatagaagacggaagcgtacaattagcagatcattaccaacaaaatacaccaataggcgacggacctgtactcctaccagacaaccactatttatcaacccaatcagctttaagtaaagacccaaatgagaaacgagaccacatggtgctacttgaatttgtaacagcggcaggcattactttgggcatggacgaattatataaaaggagcagagatattagtcatggattcccaccagcggtagcagcacaagacgacggcactttaccaatgagttgcgcacaagaaagtggaatggatagacaccctgcagcatgcgcttcagcgagaataaatgtgtaa

SEQ ID NO: 57 - DNA, 855 bp, Artificial Sequence
  Modified Open Reading Frame
atggtatctaagggcgaggaactgttcaccggcgtagtgcccattctcgtcgagctcgacggcgacgtgaatgggcacaagttctccgttagcggagagggcgagggtgatgcaacttatggtaagttgacacttaagttcatctgcaccaccggcaagctgccggtgccctggcccacgctggtgactacgctcacctacggcgtccaatgcttcagtcgataccctgatcacatgaagcagcacgatttctttaaaagtgccatgcctgaagggtacgtccaggaacggacgatattcttcaaggacgatggcaactataagactcgtgctgaagtgaaattcgagggtgacactcttgtcaaccgcatcgaattgaagggtatcgacttcaaggaggacgggaacatcctgggccataagctagaatataactacaacagtcataatgtctatattatggccgacaagcagaagaatggcattaaagtcaacttcaagattcggcacaatatcgaggatgggagtgtccagctggcggatcactaccagcagaacactcccataggagatggtcccgtcctccttccagataaccattatctctctactcagagcgctctgagtaaggatccaaacgaaaagagggatcatatggttcttctggagttcgtcacagccgcagggataaccctcggtatggacgaactctataagcgtagcagggacatcagccacggctttcctcccgccgtggcggcacaggacgatggcacgctgcccatgtcctgtgcccaggagagcgggatggatcgacatcccgcggcgtgcgcgtcagcgcgtatcaatgtttaa

SEQ ID NO: 58 - DNA, 855 bp, Artificial Sequence
  Modified Open Reading Frame
atggtatcaaaaggcgaggagctgttcaccggagtggtcccaatcttggtggagctggatggcgacgtgaacgggcacaagttctccgtgtcaggtgagggtgaaggtgatgccacctacgggaagctgaccctgaagtttatatgcactacagggaagcttcccgtgccgtggcctaccttggtcactaccctcacctatggagtacagtgcttcagtcgctatccagaccatatgaagcagcatgacttcttcaagtctgctatgcccgagggctacgtccaggagcggacgatcttcttcaaggatgacgggaactacaagacccgtgcggaggtgaaatttgagggcgacactctggtgaacaggatcgaacttaaagggattgactttaaggaggatggcaacatcctgggccataagttggaatacaactataacagccataatgtatacattatggcggacaagcagaagaatgggataaaggttaactttaagatccgtcataacatcgaggacggatcagttcagctggcggatcattaccagcagaacacgcccatcggcgatgggcccgtgctcttgccagacaaccactacttgtcgacgcagagcgcgctgtccaaggaccctaacgaaaagagggaccatatggtcctactcgaattcgttactgcggccgggataacccttgggatggatgagctctacaagcggagtagagacatctcccatgggttcccgcccgcagtggcggcgcaggacgacgggaccctcccgatgtcctgcgcccaggaatccgggatggacaggcaccctgcggcgtgtgcctccgcccggattaacgtctaa

SEQ ID NO: 59 - DNA, 855 bp, Artificial Sequence
  Modified Open Reading Frame
atggtgagcaagggtgaagagctcttcactggagtcgtgcccattctcgtcgagctagatggcgacgtgaatgggcataaattctcggtctccggtgagggcgaaggagacgccacgtacgggaaacttaccttaaagtttatatgcacgactggtaagttacccgtcccttggccgaccctggtcacgacactgacctatggcgtccagtgtttctcgaggtatcccgatcatatgaagcagcatgacttcttcaaatcggcgatgcccgagggatacgtccaggagaggactatcttcttcaaggacgacggcaattacaagaccagggcggaggtgaagttcgagggtgacactctcgtgaatcgcatcgagctcaaagggatcgatttcaaggaggacgggaatatactgggccacaagctcgagtataattacaacagccataatgtatacattatggctgacaagcagaagaacgggattaaggtgaactttaaaattcggcacaacatagaggacgggtccgtccagctggcggatcactaccagcagaatacgccgatcggcgacggacctgtcctcttgcccgataatcactatctctcgactcagtctgctctcagcaaggacccaaacgagaagcgagatcacatggtactgctcgaattcgtgacggcggccggtataactcttggaatggacgagttatacaagcggagccgtgacatcagtcacggctttccgccggcggtggccgcccaggacgacgggactctcccgatgtcctgcgcacaggaaagcgggatggaccgccatcccgccgcctgtgcaagcgctcggatcaacgtctaa

SEQ ID NO: 60 - DNA, 855 bp, Artificial Sequence
  Modified Open Reading Frame
atggtaagtaaaggtgaagagctcttcaccggcgtcgtaccgatcctggtcgaacttgatggcgacgtcaacggccataagttcagcgtcagtggcgagggcgagggcgacgcgacctacggcaaactgacgctgaagttcatctgtacgacagggaagttaccagtaccgtggcccacactggtgactaccctgacgtacggcgtgcagtgcttcagtcggtaccctgaccacatgaagcagcacgacttcttcaagtctgctatgcctgagggctacgtccaggagcggaccatcttctttaaagatgatggtaattacaagaccagggcggaggtcaagttcgagggtgacaccctcgtgaaccgcattgaattgaagggtatcgacttcaaagaggatggaaacatcctcgggcacaagctggagtataactacaacagccataatgtgtacattatggctgataagcagaagaatgggataaaggtgaatttcaaaatccggcacaacatagaggacggcagcgtccagctcgccgatcactatcagcagaacacaccgatcggcgacgggcctgttctgttgccggataaccattatctctccactcagagtgccctttcgaaggatcctaatgagaagcgggaccacatggtgttgctcgagttcgtcacggccgcagggatcacgctgggcatggatgagctttacaagcgaagccgtgacattagtcacggcttccctccagccgtggccgctcaggacgacggtacgctgccgatgtcgtgcgcgcaggagagcggtatggaccgccatcctgcagcgtgtgcatcggcgcgtatcaacgtgtaa

SEQ ID NO: 61 - DNA, 855 bp, Artificial Sequence
  Modified Open Reading Frame
atggtctctaagggcgaggagctgttcaccggagtcgtccctatacttgtcgaactggacggagacgtcaatggtcacaagttctccgttagcggagagggcgagggagacgccacctacgggaagctgaccctgaagttcatatgtacgaccggtaagcttcccgtcccgtggcccacgcttgtgaccacattgacgtatggcgtccagtgcttcagccggtacccggaccatatgaagcagcacgacttctttaagtcggctatgcccgagggctacgtgcaggagcggaccatcttcttcaaggacgatggtaattacaaaacccgcgcggaggttaagttcgaaggagacacgcttgtcaaccgcatcgagcttaagggcatagacttcaaagaggatggtaacatcctcggccataagctcgagtataattacaacagccataatgtttacattatggccgataaacagaagaatggtataaaagtaaatttcaagattcgacataatatagaggacggctccgtacagctcgcggatcattatcagcagaatacacctataggtgacgggcccgtccttctgcccgataatcactacctgagcacacaatctgctctcagtaaggatcccaacgaaaagcgggatcacatggtattgcttgaatttgtcaccgcggccgggattaccctgggaatggatgagctgtacaagcgcagccgggacatttcccatgggttcccgcctgcggtggccgcgcaggacgacggaacgttgccgatgtcctgcgcgcaagagagcgggatggacagacatcccgccgcgtgcgcgagcgcgcggatcaacgtgtaa

SEQ ID NO: 62 - DNA, 855 bp, Artificial Sequence
  Modified Open Reading Frame
atggtgtccaagggtgaggagttattcacgggagtggtcccgatcctggtcgaactcgacggagacgtgaatgggcataagttcagcgtctccggcgagggcgagggagacgccacgtacgggaagctgaccctcaaatttatctgcacgactggtaagttaccggtgccgtggccaactctggtcaccacgctcacgtatggcgtgcagtgtttcagcaggtaccctgaccatatgaaacagcatgacttctttaagtctgccatgccagagggctacgtgcaggagcgcacgatcttcttcaaggacgacggtaactataagactcgtgcagaggttaagtttgagggcgatacccttgtcaaccgcatcgagttgaagggtatcgacttcaaggaagatggcaacatcttaggccataagctggagtacaattacaattcccacaatgtctacatcatggcggacaagcagaagaatgggattaaggtaaacttcaagatccgtcacaatatcgaggacggatctgtccagctggccgatcactatcagcagaatactcctataggcgatggtccagtgctcctgcccgacaatcattacctgagcactcagagtgctctgtcaaaggatcctaacgagaagagggaccatatggttcttctcgagttcgtcactgccgcagggattacccttggtatggacgaactatacaagaggtcccgtgatatatctcacgggttccctccggcggtggccgcgcaggacgatgggactcttcccatgtcctgcgcccaggagtctggtatggacaggcatccggcggcgtgcgcctcggcgcggatcaacgtgtaa

SEQ ID NO: 63 - DNA, 855 bp, Artificial Sequence
  Modified Open Reading Frame
atggtttcaaaaggcgaggagctattcaccggcgtggtgccgatcctcgtggagctggatggcgatgttaacggccataagttcagcgtctccggcgaaggcgaaggagacgccacatatgggaaactgacgctcaagtttatatgtaccacaggaaaattgccggtcccgtggcccacgctggtcaccaccttgacatatggtgtccagtgcttcagtcggtatcccgaccacatgaagcagcacgacttcttcaagtcggcgatgcctgagggctacgtgcaagagcggactatcttcttcaaggatgatggtaactacaagacccgcgccgaggtcaagttcgagggcgataccttggtgaatcgtatcgagctaaaaggcatcgacttcaaggaggacggcaatatcctgggtcataaacttgagtataactataattcccataatgtgtacattatggccgacaaacagaagaatgggatcaaagtcaactttaagatccgccataacatagaggacggcagcgttcagctggccgaccactatcagcagaacacgcccatcggcgatgggcccgttctgctgccggacaaccattacctgtccacgcagtcagcgctctcgaaggatccaaacgagaagagggaccatatggtccttctcgagttcgtcacggccgcagggataaccctgggcatggacgaactttacaaaaggtcccgggacatcagccacggcttccctccagccgtggctgcgcaggatgacgggacattacccatgtcctgcgcccaggaatctgggatggaccgtcatcctgcggcgtgcgcgtccgctcggattaatgtgtaa

SEQ ID NO: 64 - DNA, 855 bp, Artificial Sequence
  Modified Open Reading Frame
atggtatcaaagggagaggaactgtttacaggcgttgtgcccatcctagtcgagctcgacggagacgtcaatgggcacaagttctccgttagcggagagggtgagggtgacgccacgtatggtaagctcaccctcaagtttatatgtacgaccgggaagcttcccgtcccgtggccgactctggtcaccaccctgacctatggagtccagtgtttcagtcgatatcctgatcacatgaagcagcacgacttcttcaagtccgccatgccggagggctatgtgcaggagcgcaccatcttcttcaaggatgacgggaattataaaacccgggctgaggtcaagttcgagggcgacaccctcgtgaaccggatcgagttgaagggaattgacttcaaggaagatggtaacatcctaggccataagttggagtacaactataacagccataatgtatacattatggctgataagcagaagaatggcatcaaagtcaacttcaagatccggcacaatattgaggatggctcagttcagctggctgatcattatcagcagaatactcctataggagatggtccggtcctgctcccggacaatcactatctgagtactcagagtgcactgtccaaggatcccaacgagaagagggatcatatggtgctgctagagttcgtcacagccgcagggatcaccctgggcatggacgaactctacaagaggtcacgggacatcagccacggctttcctccggccgtggctgcccaggacgacgggacgcttccaatgtcctgtgcacaggaaagtgggatggatcgccatcccgctgcctgtgccagcgctagaattaatgtataa

SEQ ID NO: 65 - DNA, 855 bp, Artificial Sequence
  Modified Open Reading Frame
atggtttcaaagggcgaggaactgttcacgggagtcgtgccgatcctggtagaattggatggcgacgtaaacggccataaattctctgtgagcggcgagggcgagggtgatgctacctacggtaagctcacgctgaagttcatctgcactaccggcaagttgccggtaccatggccgacgttggtcacgaccctgacctacggcgtgcagtgcttcagcaggtatcccgaccacatgaagcagcatgacttctttaagtcggcgatgccggagggctacgtccaggagaggaccatcttcttcaaggacgatggtaactacaagaccagagccgaggtgaaatttgagggtgatactctggtcaacaggatagagctcaaagggattgactttaaggaggatggaaacatcctgggacacaagttggaatacaactacaacagccataatgtatacattatggctgataagcagaagaacgggatcaaagtcaactttaagatccggcataacatcgaggatgggagtgttcagttggcggaccattaccaacagaacactcctatcggcgacgggcctgtcctgttgccagataatcactacctctctacccaatcggctctttccaaggatcctaatgaaaagcgggaccacatggtcctgctagagttcgtcacggctgcagggatcaccctgggcatggacgaactctacaaaaggtctcgcgacatcagccacggcttccctcccgccgtcgccgcgcaggatgacggcacgctcccaatgagctgtgcgcaggagtctggaatggacaggcatcctgcggcgtgcgcctcggcgcggatcaacgtgtaa

SEQ ID NO: 66 - DNA, 855 bp, Artificial Sequence
  Modified Open Reading Frame
atggtttcaaagggcgaggagctcttcacaggagttgtgcccatcctggttgagcttgacggagatgtgaatggtcacaaattctccgtaagcggcgagggtgagggtgatgccacgtatggcaagctaaccctcaagttcatatgtaccacgggcaaattgcccgtgccgtggcccacgctggtaacgacgctcacctacggcgtgcagtgctttagccggtatccggatcatatgaagcagcatgacttcttcaagagcgcaatgcccgagggctatgttcaggagagaactatcttcttcaaagacgacggcaactacaagacgcgtgccgaagtcaaatttgaaggagatactctcgtcaatcgcatcgagctgaaagggattgacttcaaggaggatggcaacatcctcggtcacaagctggaatataactacaacagccacaacgtctatattatggcggataaacagaagaatggtattaaagttaacttcaagatccgccataatatagaagatggtagtgtccagctggccgaccattatcagcagaacacgcccatcggcgatgggcctgttctcttgcctgataatcactacctgagcacccagtcggcattgagcaaggatcccaacgaaaagagggatcacatggtgctgctcgaattcgtgaccgctgctgggattacacttggtatggacgagctgtataagcggtccagggatatctctcatggattcccaccggcggtggcggcacaggatgacggtaccctgcccatgtcctgtgcacaggaatcgggcatggaccgtcatcctgccgcctgcgcctcggcccgaatcaatgtgtaa

SEQ ID NO: 67 - DNA, 855 bp, Artificial Sequence
  Modified Open Reading Frame
atggtatctaaaggagaagaattgtttacaggagttgttccaatccttgttgaattagatggtgacgtaaacggacataagttctcagtaagtggtgaaggtgaaggagatgctacatatggaaaattaacgttgaaatttatttgtactaccggaaaattaccagtcccatggccaacactcgtgacaacattaacctatggagtgcaatgctttagccgatacccagatcatatgaaacaacacgatttcttcaaatcagcaatgccagaaggatatgtacaagaaagaacaatattctttaaagacgatgggaattacaagacacgcgcagaagttaaatttgaaggagacacattagttaacagaatagagttaaaaggaatagactttaaagaagacggaaacatattaggacataaattagaatacaattacaattcgcataacgtatacataatggcagacaaacaaaagaatggaataaaagtaaactttaagataagacataatattgaagacggcagtgtacaactcgcagaccactatcaacaaaacacaccaattggagacggacccgtgttattacccgataatcattaccttagcactcaaagcgcactatctaaagacccaaatgagaaacgagaccacatggtattgcttgagtttgtaactgcagctggaataactttgggaatggatgaattatataaaagaagcagagacataagccacggatttcctcccgccgtagccgcacaagatgacggaaccttaccaatgagttgcgcacaagaatcaggaatggaccgacacccagcagcttgcgccagtgcacgcataaacgtataa

SEQ ID NO: 68 - DNA, 855 bp, Artificial Sequence
  Modified Open Reading Frame
atggtctcgaagggcgaagaactatttacaggagttgtaccaatattagtggaattagatggtgatgtaaacggacataaatttagcgtatcaggtgaaggagaaggagatgcaacttacggaaaactaacattaaaattcatttgtacaacgggaaaattaccagtgccttggccaacactagttactacacttacttacggcgttcaatgtttctcacgatacccagaccacatgaaacaacatgatttcttcaaaagtgcgatgccagaaggttatgtacaagaacgaacaatattctttaaggacgatggaaattataaaactagggctgaagtaaaatttgaaggtgatacactcgttaatagaattgaattaaaaggaatcgatttcaaagaagacggaaatatattaggacacaaacttgaatacaattataactctcacaacgtttatataatggcagacaaacaaaagaatggaataaaagtaaatttcaagatcaggcataatattgaagacggaagcgtacaacttgctgaccactaccaacaaaatacacccatcggagacggccctgtactactaccagataatcattacctatcgacacaaagcgcattatcaaaagatcccaacgagaaaagagaccacatggtattactagagtttgtgactgctgccggaataacattgggaatggatgaactatacaaacgctcaagggacatatcgcatggcttccctcctgctgttgctgcccaagatgatggaactctgcctatgtcatgtgcacaagaaagtggaatggatagacacccagcagcttgcgcctcagcccgaataaatgtgtaa

SEQ ID NO: 69 - DNA, 855 bp, Artificial Sequence
  Modified Open Reading Frame
atggtctcgaaaggcgaagaattatttactggtgttgtaccaatattagttgagttggatggagatgtaaacggtcacaaatttagcgtaagtggagaaggagaaggagatgctacatacggaaaattaacattgaaatttatatgcacaacaggaaaattaccagtcccatggcctacattagtaacaaccttaacctacggagtacaatgctttagccgatatcccgaccacatgaaacaacacgatttctttaaatccgcaatgccagaaggctatgtacaagaacggactatattctttaaagacgacggaaactacaaaacacgagctgaggtaaaattcgaaggtgacacattagtaaataggatagaattaaaaggtatagatttcaaagaagacggtaacatattaggacataaattagagtacaattacaattcccacaacgtatatataatggcagataaacaaaagaacggcattaaagtgaatttcaaaatcagacacaacattgaagatggctccgtgcaacttgctgatcattatcaacaaaatactccaattggtgatggacccgttctacttcccgacaaccattatcttagcacacaatccgcattatcaaaagaccctaacgagaaacgagatcacatggtattattagaatttgtaacggcagccggaataacacttggaatggacgaattgtataaacgaagtcgagatataagtcatggattccctcccgcagtagctgcccaagacgacggaacactaccaatgagttgcgcacaagaatcaggcatggatcgtcacccagcagcttgtgcttcagcccgaattaatgtttaa

SEQ ID NO: 70 - DNA, 855 bp, Artificial Sequence
  Modified Open Reading Frame
atggttagcaagggagaagaattatttacaggagttgttccaatattagtcgaattagatggtgatgtaaatggacataaattcagtgtatcaggagaaggagaaggcgacgctacctatggaaaattaacactcaaatttatttgcacaaccggaaaactacctgtaccttggcctaccttagtgacgaccctaacctacggagtccaatgcttctcccgttacccagaccatatgaaacaacacgatttctttaaaagcgcaatgcccgaaggttatgtacaagaacgcactatattctttaaagacgacggaaactataaaacaagagcagaggtcaaattcgaaggagacacattagtaaaccgcatagaactcaaaggcatagatttcaaagaagacggcaatatacttgggcacaaactagaatacaactacaactcacacaacgtatacataatggccgacaaacagaagaatgggataaaagtaaactttaaaattagacataacattgaagacggaagcgtacaactagcagatcattaccaacaaaacacaccaataggcgatggaccagtactgttacccgataatcattatttaagcacacaatccgcactttccaaagaccctaatgagaaaagagaccacatggtattattagaatttgtaactgcagccggaatcactttaggcatggacgaattatataaacgctcacgagacatttcacacggatttccacctgctgttgcggctcaagacgatggaactctacctatgtcatgtgcacaagaaagcggtatggacagacacccagcagcatgcgcctccgcccgtattaacgtctaa

SEQ ID NO: 71 - DNA, 855 bp, Artificial Sequence
  Modified Open Reading Frame
atggtctcgaagggcgaagagttatttacaggagttgttccgatattagtagagttagatggagacgtaaatggacataaattctcagtaagtggagaaggtgaaggtgacgcaacatacggaaaactaactttaaaatttatatgcacaacaggaaaacttcccgtaccatggcccacactagttacaacattaacatacggagttcaatgcttctcacgatacccagatcacatgaaacaacacgacttctttaaaagcgccatgccagaaggatatgttcaagagcgtactatattcttcaaagatgatggaaactataaaacacgagccgaggttaaatttgaaggtgatacattagtgaataggattgaattaaaaggaatagatttcaaggaagacggcaacattcttggacacaaattggaatataattataattcgcacaatgtatatattatggcagataaacaaaagaatggtataaaagtaaatttcaaaataagacacaacatagaagatgggagcgtacaactagccgatcattaccaacaaaatacacctataggagacggtcccgtactattacctgacaaccactacctttcaactcagagtgcactatcaaaagaccctaatgagaaacgcgatcacatggtattacttgaatttgttacagccgccggaattacacttggaatggatgaattatataaacgatcgagagatataagtcatggatttcctcccgctgttgctgcccaagacgatggaaccctaccaatgagctgtgcccaagaatcaggaatggatagacacccagccgcctgtgcttcagcccgtataaacgtttaa

SEQ ID NO: 72 - DNA, 855 bp, Artificial Sequence
  Modified Open Reading Frame
atggtgtctaagggtgaggaattgtttactggtgtagtacccatactcgtagaacttgacggcgatgtaaatggtcataaatttagtgtaagcggagaaggagaaggagatgcaacttacggaaagctaaccctaaaattcatatgcacaactggaaaactacctgtaccctggcccactttagttactactctgacttatggtgtacaatgcttctcgaggtacccagatcacatgaaacaacacgacttctttaaaagcgctatgcccgaaggatacgtacaagagagaacaatattctttaaagatgatggaaattataagacgcgagctgaagtaaaatttgaaggtgacacactcgttaataggattgaattgaaaggaattgacttcaaagaagacggaaacatattaggacacaaattagaatacaactacaattcacacaacgtttatattatggctgacaaacaaaagaatggcataaaagtaaatttcaaaatacgacacaacatagaagatggctctgttcaacttgctgaccactaccaacaaaacacacccattggagacggccctgtattactacctgataaccactatctatccacacaatccgcactttcaaaggacccaaacgagaaacgcgatcacatggtattactcgaatttgtcactgccgccggaataactttaggaatggacgaactatacaaacgatcaagagatatatcccatggcttcccacccgcagttgctgcacaagatgacggaactctgccaatgtcatgcgcccaagaatctggaatggatcgacacccagccgcctgcgcctctgcccgtatcaatgtctaa

SEQ ID NO: 73 - DNA, 855 bp, Artificial Sequence
  Modified Open Reading Frame
atggtgtcgaaaggcgaagaattatttacgggtgtggtaccaatacttgttgagcttgatggtgacgtaaatggacataaattcagcgtatctggtgaaggagaaggcgatgcgacatatggaaaactgacacttaaatttatttgcacaaccggaaaattacccgtaccttggccaacacttgttacaaccttgacttacggcgtacaatgtttctcacgctacccagaccatatgaaacaacacgatttctttaaatctgcaatgccagaaggatacgtacaagagagaacgatattctttaaagatgacggaaactataaaacaagagcagaggtaaaattcgaaggtgatacattagtaaataggatagaattaaagggaatagatttcaaagaagatggaaatatattaggtcacaaactggaatacaattacaattcgcataacgtttatatcatggctgacaaacaaaagaacggaatcaaagtaaatttcaaaatacgacacaacatagaggatggtagcgtacagttagcagatcattatcaacaaaatacaccaattggagacggacctgtgctgcttccagacaatcattatttatcaacacaatctgccttatcaaaagacccaaatgaaaagcgtgaccacatggttctactagaattcgtaaccgccgcaggaataacattaggaatggatgaactatataaacgaagtagagatatatcacatggattcccaccagctgttgccgcacaggatgatggaactttacctatgagttgcgcccaagagagtggaatggatcgacaccctgctgcatgtgcttccgcgagaatcaatgtttaa

SEQ ID NO: 74 - DNA, 855 bp, Artificial Sequence
  Modified Open Reading Frame
atggtgtctaaaggcgaagagctatttacaggagtggtccctatacttgtagaacttgacggcgatgtaaacggccataaattcagcgtttctggcgaaggagaaggagatgcaacatacggaaaattaactttaaaatttatatgcacaactggaaagctgcctgtcccttggccaacattagtaactaccctcacatatggcgtccaatgctttagccgatacccagatcacatgaaacagcacgatttctttaaaagcgcaatgccagaaggttatgtacaagaacgcacaatattctttaaagacgacggaaattataaaacgagagcggaagtaaaatttgaaggagacacgttagttaatagaatagaactgaaaggaatagatttcaaagaagacggaaacatattaggccacaaactcgaatataattacaactctcacaatgtatatataatggctgataaacaaaagaacggaataaaagttaatttcaagatacgacataacatagaagatggctctgtacaattagccgaccattaccaacagaacacacccataggcgacggacccgtattattacccgacaaccactacctatctacacaatctgcccttagtaaagacccgaatgagaaacgagaccacatggtgttattagaattcgtgaccgccgctggaattaccttaggaatggatgaattgtataaaagaagtcgagatatatcacatggatttccgcctgccgttgctgcacaagacgatggaacattacctatgagttgcgcacaagaaagtgggatggacagacacccagcagcatgtgcaagtgcaagaatcaatgtataa

SEQ ID NO: 75 - DNA, 855 bp, Artificial Sequence
  Modified Open Reading Frame
atggtatcaaagggagaagaattattcacgggtgtagtaccaatattagtagagttagatggagacgtaaatggacataaattcagtgttagcggagaaggagaaggagatgctacttatggaaaattaactttgaaatttatttgtacaaccggaaaattgccagtaccttggcccacactagttacaacattgacatacggcgttcaatgcttcagcagatacccagaccatatgaaacaacatgatttctttaaaagtgcaatgcctgaaggatacgtccaagaacgaactatattctttaaagatgatggaaattacaaaacaagagcagaagtgaaatttgaaggagatacgctagtaaaccgaatagaactgaaaggaattgatttcaaagaagatggaaatatacttgggcacaaactagaatataattacaattcacacaacgtttatataatggcagataaacagaagaacggaattaaggtaaactttaaaataagacacaatattgaagacggctcagtgcaacttgcggatcattatcaacaaaacacaccgattggagatggccctgtattactacccgataaccactacctttctactcaaagcgcattatctaaagaccctaatgaaaagagagatcacatggttctgttagaattcgtgaccgccgctggaattactcttggaatggatgaactttataaacgctcccgcgatatttcacatggctttcctcctgcagttgctgcccaagatgacggcactttaccaatgtcttgcgctcaagaatctggcatggatcgacaccctgcagcatgtgcctctgcgagaataaacgtataa

SEQ ID NO: 76 - DNA, 855 bp, Artificial Sequence
  Modified Open Reading Frame
atggtctccaagggcgaagaattgtttactggagtagtaccgatattagtagaacttgatggcgacgtaaatggacataaattctctgtgagtggtgaaggtgaaggtgacgcaacatatggaaaattaactctgaaatttatttgtacaacgggtaaactaccagtaccatggccaactctagtaacaactctcacttacggcgtccaatgtttctccagatatcccgaccacatgaaacaacacgatttcttcaaaagtgcaatgccagaaggatacgtacaagaaagaactatattcttcaaagatgacggaaactataaaactagagctgaagtaaaatttgaaggtgacacactcgtaaacaggatagaactcaagggaattgactttaaagaagacggaaacatacttggacacaaacttgaatataattacaactcacataacgtgtatataatggcagacaaacaaaagaacggtatcaaagtaaatttcaaaataagacacaatatagaagacggctcagttcaattagcagatcattatcaacaaaacactcctattggcgatggacctgttctactacccgacaaccattacctaagtactcaatcagcattatctaaagacccaaatgaaaagcgcgatcacatggtactactggaatttgtaactgccgccggaataacactaggaatggacgaactatataaacgatcaagagatatatcccatggcttcccacctgcagtagctgcacaagatgacggaaccttaccaatgagttgtgcccaagaatcaggaatggatcgacatcccgccgcatgcgcttccgcccgaataaacgtttaa

SEQ ID NO: 77 - DNA, 855 bp, Artificial Sequence
  Modified Open Reading Frame
atggtctccaaaggcgaggaactcttcaccggcgtggtgccaatactggtggaattagatggtgatgtaaatggccacaagtttagtgtgtcgggtgagggcgaaggtgatgccacttatgggaaactgacgttgaagttcatttgcacgactgggaagctgccggtaccttggcccacactagtgacgacccttacatacggtgtacagtgcttctcgcgatatccagaccacatgaagcagcacgacttcttcaagagtgcgatgccagagggttacgtacaggaacgaacgatcttcttcaaagatgacgggaactataagacgagagcagaggtgaaattcgagggagatactttggtaaataggattgagctgaaaggtattgatttcaaggaggatggcaacatactcggccataaactggagtataattacaactctcataatgtctatattatggcggacaaacagaagaatggtatcaaggtcaacttcaaaattcgccataacatagaggatggaagtgtacagttggccgaccattaccaacagaacacacctatcggtgacggtcctgtgttgctaccagacaatcactacctgagtactcagtctgccttgtcaaaagatcccaatgaaaagagagaccatatggttctcttggagtttgtcactgctgctggcattacccttggtatggacgagctgtacaaacgtagtagggatatttctcatggtttcccgcccgcggtcgctgctcaggatgacgggactttacccatgtcttgtgcccaagaaagtggtatggaccggcacccggctgcgtgcgcttcagctaggatcaatgtctaa

SEQ ID NO: 78 - DNA, 855 bp, Artificial Sequence
  Modified Open Reading Frame
atggtcagtaaaggagaggagctgtttacgggcgttgtacccatacttgtggagctcgatggcgatgtcaatgggcataagtttagtgtctcaggagaaggtgagggagacgccacgtatgggaaattaacactgaagtttatctgcactactgggaagctgcccgtcccatggcctaccttggtgacgactctcacatatggcgtgcagtgcttctcaaggtacccggatcatatgaagcaacacgacttctttaagtcagccatgcctgagggatacgttcaggagcggactatattctttaaggatgatggaaactacaaaactcgggccgaagtcaagtttgaaggagacaccttggtcaatcgcattgaactcaagggcatcgacttcaaggaagacggtaatatattgggtcacaagctggaatataactataatagccacaatgtgtatatcatggccgataaacaaaagaacggtataaaggttaactttaaaattagacataacatcgaagacgggtctgtccaattggccgatcattatcaacagaatacaccaattggcgatggtccagtgttattgcccgataaccattacctaagtacacaatccgccttgagtaaagatcctaatgagaagcgagatcacatggtgcttctagaattcgtgacggcggccggaatcacattaggtatggatgagctctacaagcgaagccgtgatatctcccacggctttccgccagctgtggctgcacaggatgatggcacgctcccaatgtcctgcgctcaggagtctggcatggaccggcacccagcagcatgtgcttccgcccgaataaatgtataa

SEQ ID NO: 79 - DNA, 855 bp, Artificial Sequence
  Modified Open Reading Frame
atggttagcaaaggtgaagaactgttcacaggtgtcgtaccgattctggtagaacttgatggcgatgtcaatggtcataaattcagcgtctcaggagaaggcgaaggtgatgcaacttacggcaaactaaccttaaaattcatttgtacaacagggaagctcccggtgccttggccgaccctggtaaccacgctaacctacggtgtgcagtgtttctccagatatcctgatcacatgaagcagcacgacttcttcaaatcagctatgcctgaaggatatgtgcaagaacgaactatcttctttaaagatgacggaaactataagacccgggctgaggtcaaattcgagggagacactctggtcaacaggatagagttgaagggaatagactttaaggaggatgggaacatcttaggccacaagttggagtataattataactcgcacaacgtctatatcatggccgataagcagaagaatggaattaaggtcaacttcaagatccgccataatatagaagatggatcagtgcagttagccgaccactatcagcaaaatactccaattggcgatggccctgtcctcctccctgacaatcactatctgtccacccagagtgctttatcaaaggatcccaacgaaaagcgtgaccacatggtcttgttggaatttgtcacggctgcaggtataactttaggcatggatgaattgtataagagaagtcgagacattagccatggattccctccagctgtggccgcgcaagacgacggcactttacccatgagttgcgcccaggaatcagggatggatagacaccctgcggcctgcgctagtgcgcgaataaacgtgtaa

SEQ ID NO: 80 - DNA, 855 bp, Artificial Sequence
  Modified Open Reading Frame
atggtaagcaaaggcgaggaactgtttacaggcgtggtcccgatactcgtggaattggacggtgacgtaaacggacacaaattctcagtgagcggagagggcgaaggagatgcaacctacggcaagctcacgctgaagttcatttgcaccactggtaaactacccgtgccatggcccacacttgtcacgacactaacatatggcgttcaatgcttctcgagatatccagaccacatgaagcagcatgacttcttcaaaagtgccatgcctgagggctacgtgcaggagcggaccatattctttaaagatgacggaaactacaaaactagagctgaggtgaaatttgagggtgatacattggtcaaccgtatagagcttaagggtattgatttcaaggaagacggtaacatactcgggcataaattagaatacaactataactcacataatgtgtacatcatggccgacaaacaaaagaacggcatcaaggtcaactttaaaatccgacacaatattgaggacgggtcggtccagctagcggaccactatcagcagaacactccgataggcgacgggcctgttctgctgcctgacaatcattaccttagtacgcagtctgccctcagcaaggacccaaacgagaagcgtgaccacatggtgttgctcgagtttgttaccgctgctgggatcaccttaggaatggatgaactttacaaacgctctcgggatatctcgcacggtttccctcctgctgtggctgcgcaggacgatggtacgctacccatgagttgtgcgcaagagagtggtatggaccgacatccggcagcatgcgccagcgccagaataaatgtctaa

SEQ ID NO: 81 - DNA, 855 bp, Artificial Sequence
  Modified Open Reading Frame
atggtgtccaagggagaagagttatttacaggcgttgtacccatactcgtcgaacttgatggagatgtaaatggacacaaattcagtgtcagtggagaaggagagggcgatgccacctatggaaaactcacgttgaaattcatctgcaccactgggaagctgccggttccgtggcctaccctggttacaactctcacatacggcgtccagtgcttcagccgctatcccgatcatatgaaacaacatgatttctttaaaagcgctatgcccgaagggtacgtacaggagcgtactatattctttaaagatgacgggaattacaaaaccagggcggaagtcaaatttgagggcgatactcttgtcaatcgcatcgaactgaaagggatagactttaaagaagacgggaatatcctgggccacaaattggagtacaactataattcccataatgtgtacatcatggctgacaagcagaagaacgggatcaaggtaaacttcaagattcgccacaacatagaagatggaagtgtacaacttgccgaccattatcagcagaatacaccgatcggcgacggtcccgttcttctgcctgataatcattatctgtccacacagagtgcactatctaaagaccctaacgaaaagcgggaccacatggtattgctagagttcgtgactgctgccggcataactttgggcatggacgagctatacaaaaggagccgtgatatttcacatggatttccaccagcggttgctgctcaggatgacggcacccttccaatgagttgtgcccaggagtctggtatggaccgacatcccgcggcttgtgcgtcggcaaggattaatgtctaa

SEQ ID NO: 82 - DNA, 855 bp, Artificial Sequence
  Modified Open Reading Frame
atggtgtcaaaaggcgaggaactattcaccggcgtcgtaccgattctagttgagcttgacggtgacgttaatggacataagttctcggtctctggagagggcgagggcgatgcgacctacggtaagcttacgttaaagttcatttgtaccaccgggaaactgcccgtgccttggcctactctagtgactacgctgacttacggtgtgcagtgcttcagtaggtacccagatcacatgaaacagcacgatttctttaagagcgcaatgcctgaagggtatgtccaggagagaactatcttctttaaggatgacggtaattataagacgcgcgcggaagtcaagtttgaaggagataccttggtcaatcgcatagagctcaagggtattgacttcaaggaggacggtaatatacttggacataagttagaatacaattacaactcccacaatgtctatattatggccgacaagcagaagaatggcataaaggttaatttcaagatccgtcacaacattgaggacgggtccgtgcagttagccgaccactatcagcagaacacgcctattggcgacggtccggtccttctgcccgataatcactaccttagcacacagagcgcactatccaaggacccaaacgaaaagagagaccacatggttctcctcgagtttgtcaccgccgccggaataaccctgggaatggatgagttatacaaacgatcaagggacatctcccatggtttcccgcccgccgttgctgcgcaagatgatggtactctacccatgagttgtgctcaggagagtggaatggatcggcaccctgcagcctgtgcaagcgcacgtatcaatgtataa

SEQ ID NO: 83 - DNA, 855 bp, Artificial Sequence
  Modified Open Reading Frame
atggtatccaaaggagaagaattgtttacgggcgtggtcccgattctcgtggagttggacggtgatgtgaatggtcataagttctccgtaagcggcgaaggcgaaggcgacgcgacttatgggaagcttacattgaaatttatttgcaccaccggcaagcttcccgtcccttggccaacgctcgttacaaccctgacctatggtgtccagtgcttctctagatatccggaccacatgaagcagcatgatttcttcaagagtgccatgcccgaaggatacgtgcaagaaagaaccatcttctttaaggacgacggtaattataaaacacgtgcggaggtgaaattcgagggcgacacacttgtgaatcgcattgagcttaaaggtatcgatttcaaagaggacgggaatatactcggccataagttggagtacaactacaattcacacaacgtctatataatggctgacaagcagaagaatgggatcaaggtaaactttaaaatacggcacaatatcgaagacgggagtgtccagttggccgatcactaccagcaaaacactcctatcggagatggcccagtgctgctacctgataaccattacctttctactcagtcagccctctctaaagatcctaatgaaaagcgtgaccatatggtgttgctcgaatttgtgactgctgctgggatcactctaggaatggatgaactgtacaagaggtcgagggatatctcccacggctttccaccagctgtagcagcccaagacgacgggacgcttcctatgagttgtgcccaggagagtggaatggatagacatcccgccgcctgcgcctccgctcgaatcaatgtctaa

SEQ ID NO: 84 - DNA, 855 bp, Artificial Sequence
  Modified Open Reading Frame
atggtctccaagggtgaggagttgttcacgggcgtggtgccgatcctggttgagttggatggcgatgtcaatgggcataagttcagcgtcagtggagaaggcgagggcgacgcgacttacggtaagcttacattaaagttcatctgcaccaccggaaagttgcctgtaccatggcctacgctagtgactacgttgacctacggcgttcagtgcttcagccggtatccagaccatatgaagcagcacgacttctttaagtccgccatgccggagggatacgtgcaggagcgaactatcttcttcaaagacgacggaaactacaaaaccagggctgaggtgaagtttgaaggtgacacgttggttaatagaatagaattgaaaggtatcgactttaaagaagacggaaatatcctgggacataagcttgagtataactacaattcacacaatgtgtatatcatggccgataaacaaaagaacggaattaaggtgaactttaagataagacataatattgaagatggtagcgtgcagttagccgaccactatcagcagaacacaccgatcggtgacgggcctgtcttgctgcctgacaaccactacctttcgacccagtctgctctctccaaggatccaaacgagaaaagagatcacatggttctgcttgagtttgtcaccgccgccggtatcacattgggcatggatgagttgtataagcgctcccgggatatctcccacggatttcctcctgctgttgcggctcaagatgacggcacccttcccatgtcctgcgcgcaggagagtggtatggaccgccaccctgcagcatgcgccagcgctcggatcaacgtgtaa

SEQ ID NO: 85 - DNA, 855 bp, Artificial Sequence
  Modified Open Reading Frame
atggtctccaaaggcgaagaactgtttactggtgtcgttccgatacttgtggaactggatggcgatgtgaacgggcacaagttctccgttagcggagaaggagaaggtgatgccacatatggcaaactcaccctcaagtttatatgtactactgggaagttacctgtgccctggccaacactcgtaacgaccctgacgtacggagtccagtgcttctcaaggtaccctgaccatatgaagcagcatgacttcttcaagtccgccatgcccgaaggctacgtgcaggagagaacaatcttctttaaggatgatgggaattacaagacccgcgcagaggttaaattcgaaggtgataccctggtcaatcgaatagagcttaagggcatcgacttcaaggaggatggaaacatcttagggcataagctggagtataattacaatagccacaacgtgtacatcatggcagacaagcagaagaatggcataaaggtgaactttaagattaggcacaatattgaagatggatcggtacagctggcggaccattatcaacaaaatacacctatcggcgatggtccagtgctgcttcctgataatcactatctcagtacacagtccgccctgtcgaaggatcccaacgagaaacgtgatcatatggttctgctcgagtttgtgaccgccgccgggatcacgctagggatggacgagttatataagagaagtagagatatcagccatggctttccacccgcagtggcggcacaggacgatgggactcttccaatgtcctgcgcccaggaatctggtatggaccgccaccctgccgcctgtgcctcagcacgcatcaatgtgtaa

SEQ ID NO: 86 - DNA, 855 bp, Artificial Sequence
  Modified Open Reading Frame
atggtatcgaaaggcgaggagctgttcacgggagtggtacccattcttgtcgagttggatggagatgtcaatggtcataagttcagcgtgtcgggtgagggagagggtgatgcaacatatgggaaattgaccttgaaatttatatgtaccaccgggaagctcccagttccctggccgactctagttactacgctcacctatggagttcagtgtttctcgaggtatccggaccatatgaagcaacatgatttcttcaagagtgcgatgcctgaaggctatgtgcaagagcgaacaatcttcttcaaggacgacggcaattataagacaagagcggaggttaagttcgagggtgatacccttgtgaatcgaatcgaattgaaaggtatcgactttaaagaagatggcaatatcctgggtcacaaactggagtataattataattcacataatgtgtacattatggctgataaacagaagaacgggatcaaagttaactttaaaatacggcataacatcgaagacggaagtgttcaactcgccgatcattaccaacagaatacgcccatcggtgatggccctgttctcctcccggacaaccactacctgtctacacagagtgccctgtctaaggatcctaatgagaaaagggatcacatggtcttactcgagttcgtgacggcagcgggtatcactttaggcatggatgagttgtataaacggtcccgagatattagccatgggttccctccggctgtagccgcccaggatgatggaacacttcctatgtcttgtgcccaagagtccggcatggacaggcatcccgctgcatgcgcttcagctagaatcaatgtttaa

SEQ ID NO: 87 - DNA, 855 bp, Artificial Sequence
  Modified Open Reading Frame
atggtcagcaaaggtgaagaattattcacgggtgtagttccgatcttggtcgagctggacggcgacgtcaatggtcacaagttcagcgtctcaggcgagggcgaaggtgacgcaacatatggcaagttgactctaaaattcatctgcaccactggcaaacttccagtgccatggcccaccctggtcactactctgacatatggagtacaatgtttctcgcgctatcctgatcacatgaaacagcatgatttcttcaaaagcgccatgcctgaaggttacgttcaggagcgcacgatcttcttcaaggatgacggcaactacaagacacgtgccgaagtgaaatttgaaggtgacacactagttaataggattgaattaaaaggaattgactttaaggaagatggcaacattctgggtcacaagctggagtataattataatagccataatgtatatatcatggcggataaacaaaagaatggcataaaagtgaatttcaagattcggcacaacatagaggacggttctgttcagctggccgaccactaccagcagaacactcctattggcgatgggccagtactccttcctgacaatcactacctgagcacacagagtgcattatctaaagatcctaatgagaagcgagaccatatggtcttgctggagttcgtcacggctgccgggattaccctgggaatggacgagctgtacaagcgcagtcgtgacatctctcacgggttcccgcccgcagttgcggcccaggacgacggcactctgccgatgtcttgcgcacaggagagtggcatggatcgccacccagccgcctgtgcgagtgcacgaattaatgtataa

SEQ ID NO: 88 - DNA, 855 bp, Artificial Sequence
  Modified Open Reading Frame
atggtctccaagggtgaggaattattcacgggagtggttcctatattggtggaactcgacggcgacgttaatgggcacaagtttagcgtctctggagaaggagaaggagacgccacctatggaaaattaacgttgaaattcatctgtaccacgggaaagctgcctgtgccatggccaaccttggtaactacccttacttacggtgtacaatgtttctcgaggtaccctgaccatatgaagcaacacgatttctttaagtccgccatgcccgagggctacgttcaagaaagaaccatcttctttaaggacgatggaaactataaaacaagagccgaggttaaattcgagggagatacgctagtaaatcgtatagagctcaagggcatagacttcaaggaggatggaaatatactcggccataagttggagtacaattacaactcgcataacgtatacataatggccgataaacagaagaatggaataaaagtcaatttcaaaattcgtcacaatattgaagatgggagcgttcagcttgctgaccattaccaacagaatacgcccatcggcgacgggcctgtgctgctgcccgataaccactacctttctacacagtctgcactcagtaaagatccgaacgagaaacgcgatcacatggttctgttagagtttgtaacggcggctgggataacattaggaatggacgagctatacaagcgaagccgtgatattagccacggctttcctccagccgttgctgcacaggatgacgggaccctaccaatgtcctgtgcgcaagagtcaggcatggatcgccatccagcagcatgcgcatcagcgcgcatcaatgtataa

SEQ ID NO: 89 - DNA, 855 bp, Artificial Sequence
  Modified Open Reading Frame
atggtctctaaaggcgaggaactgtttacgggcgtggtcccgatcctggtggaactcgacggagacgtaaacgggcacaaattctctgtatctggagaaggagaaggcgacgccacctacggtaaactgacccttaaatttatttgtactacaggcaagctcccagtcccgtggccaaccctcgtgactacgctaacttacggcgttcagtgcttctccagatatcctgatcatatgaaacaacacgatttcttcaagtccgccatgcccgaagggtacgtccaagaaaggaccatattctttaaagatgatggaaactataaaactcgggccgaagtcaaatttgaaggtgataccttggtgaaccgtatagagcttaagggcattgacttcaaggaggacggcaacatcttaggccacaagctggaatacaactacaactcccacaacgtgtatattatggcggacaagcagaagaatggaattaaagtgaatttcaaaataaggcacaatattgaggacggttccgtccaattggccgatcactatcaacagaatactcccattggcgatggcccagtgttgttacccgacaatcattacttaagcacccagagcgcacttagtaaagatcccaacgagaagcgggatcacatggtgttactagagttcgttacggctgctggaattactctagggatggatgagctatataagagatcacgggatatttcacatggattccctcccgccgtcgccgcacaggacgatggtactctccctatgagctgcgcgcaagagtccggcatggatcgtcaccctgcagcctgcgctagtgcgagaatcaacgtctaa

SEQ ID NO: 90 - DNA, 855 bp, Artificial Sequence
  Modified Open Reading Frame
atggtgagcaaaggagaggagttgtttactggtgtggtcccaatactcgtggaactggatggagacgtaaatggccacaaattctcggtgtccggtgagggcgagggcgacgccacttacgggaagctcacattaaagttcatatgcaccacaggaaaactccctgtcccttggcctaccttagtcacaacattaacatacggcgtacagtgtttctctcgctacccagatcacatgaagcagcacgacttcttcaagagcgccatgccagaaggatacgtgcaagagcggaccatattctttaaggacgacgggaactacaaaactcgggccgaagtgaaatttgaaggagatactttagtgaataggatcgaacttaaaggcatcgactttaaggaagatggaaacatcctgggccataaactcgaatataactacaactcgcacaacgtgtacatcatggctgacaagcagaagaacggcatcaaggtgaatttcaagattcgacacaatatcgaagacggatccgtgcagcttgccgaccactatcagcaaaatacacccataggcgatggacctgtcctactgcccgataatcattatttatcaacacagagcgctttgagcaaagaccctaatgaaaagcgcgaccacatggtactgctggagttcgttacagctgcgggaattacgttgggcatggacgagctttacaaacgttcccgggatatttcgcacggcttcccacccgcagtcgccgctcaagatgacggcactctgcctatgtcctgtgcgcaggagtcaggaatggatagacaccctgccgcttgcgcttccgcaagaatcaacgtttaa

SEQ ID NO: 91 - DNA, 855 bp, Artificial Sequence
  Modified Open Reading Frame
atggtgagcaagggcgaggagttgtttacgggagtcgttcccatactcgtcgaactggatggagacgttaatggtcataaattcagtgtcagcggcgaaggtgaaggagatgcaacatacggtaaattaactctcaagttcatctgtacgactggcaaactgccggttccctggcccaccctggtgaccacacttacctatggagtgcagtgctttagtagatacccagaccatatgaagcagcacgacttctttaagtcggccatgccggagggttatgtccaagagcgtacgatattcttcaaggacgacggcaactataaaaccagagcagaggttaagtttgagggagatacactggtgaaccggatcgagttaaaaggcatcgacttcaaggaagacggaaatatacttggccacaaactggaatataactacaacagtcacaacgtttatataatggccgacaaacagaagaacgggattaaggttaacttcaaaattcggcacaatattgaggacgggagcgtgcagttggcggaccattaccaacagaacactccaataggagacggtccagtcttactgcccgacaaccactatctaagcacacagtccgcgctcagcaaggatcccaatgagaagagggaccacatggtgctcctggaattcgtcacagctgccggtatcactttgggcatggatgagctgtataaacggagtcgagatatttctcatggatttccgccagcagttgcggcacaggatgatggcacactgcccatgtcttgtgctcaggagagtggtatggatcggcatccggcagcttgtgctagcgcgcgcattaacgtgtaa

SEQ ID NO: 92 - DNA, 855 bp, Artificial Sequence
  Modified Open Reading Frame
atggtgagtaagggagaggagctctttacaggagtcgtacccatcctggtggagctggacggtgacgtgaatggtcataagttctccgtctccggcgagggtgaaggcgacgcgacctacggcaagcttactctcaaattcatctgcactactgggaaactaccagttccctggccaacgctcgtcactacgctcacgtacggagtgcagtgcttctcccggtaccctgatcacatgaaacaacacgatttctttaaatcggctatgcccgaaggttatgtgcaagaaaggacaatcttctttaaggacgacggaaattataaaaccagagcggaggtaaaatttgagggcgacacgctggtcaaccggattgagctgaagggaatagatttcaaagaagatgggaacatcctaggccataagctcgagtataactacaattcccataacgtgtatattatggcggataaacaaaagaatggcataaaagtgaatttcaaaatcagacacaacatcgaggacgggtccgtccaactggcggaccactatcagcagaatacacccattggagatggccctgtactgctgcccgacaaccactatttaagcacacagagcgccctttcaaaagacccaaacgagaagcgcgaccacatggtcctcctggaattcgttacagccgcaggtatcacgcttggaatggacgagttgtataaacgatcacgggatatttcacacgggtttccacccgctgttgcagctcaggacgatggtacgctgcctatgagttgtgctcaagagagcggcatggaccggcatccagcggcttgcgccagtgcacgcatcaatgtataa

SEQ ID NO: 93 - DNA, 855 bp, Artificial Sequence
  Modified Open Reading Frame
atggtgtcgaagggtgaggaactatttactggcgtggtgccaattcttgtcgagctcgatggtgacgtcaatggccataagtttagcgtctccggagaaggagaaggcgatgccacttacggcaagctcacgcttaagtttatctgtaccaccgggaaactaccagtcccgtggcctacccttgtcacaacgttgacctacggagtgcagtgcttctcgaggtatcccgaccacatgaagcaacatgacttcttcaagtccgccatgccagaagggtacgtccaggagcgtaccatcttctttaaagatgatgggaattacaaaacccgagcggaagtcaagttcgaaggcgacacgcttgtaaatcggatcgagctgaagggaatcgatttcaaggaagatggaaatatcctgggccataagttagagtataactataacagccataatgtctacataatggcggacaaacaaaagaacgggataaaggtgaatttcaagatcagacacaatatagaggacggttcggttcaactagctgatcactatcaacaaaacactcccatcggcgacggacccgtgcttctgccagataaccattatctgtccacccagagtgcactttccaaggaccctaatgagaagagggaccatatggtgctccttgaattcgtgaccgcggccggtatcactttgggcatggatgaattgtacaaaagaagccgagacatctctcacggatttccaccagcagttgcggctcaggacgatggtaccctgcccatgtcctgcgcccaggagtcgggcatggatagacatcctgccgcctgcgcttctgccaggatcaacgtgtaa

SEQ ID NO: 94 - DNA, 855 bp, Artificial Sequence
  Modified Open Reading Frame
atggtgtcgaagggtgaggaactctttacaggagttgtgcccatcttggtcgaactagacggcgatgttaacgggcataagttctccgtgtcgggagagggtgaaggcgacgcaacatatgggaagctaacattgaaatttatatgcactacgggcaagttgcctgtaccgtggcccacactcgtgactacgttgacatacggtgtgcagtgcttctcgcgataccctgatcatatgaaacaacatgacttcttcaagagcgcaatgcccgaaggatacgttcaagaacggacaatattcttcaaagacgacgggaattataaaactcgcgccgaggtgaaattcgagggtgacacacttgttaaccgcatcgagttaaaaggtatcgactttaaagaggatggtaacatcctgggacacaagttggaatataattacaacagccacaacgtgtacatcatggctgacaaacagaagaatggcattaaagttaactttaagattcgccataatatagaagatggttcggtgcaactggcggatcactaccaacaaaatactccgatcggcgacggaccggtgctactccctgataaccactatctttctacccagagcgcattgtctaaagaccctaatgagaaacgtgatcacatggtgctgctggagttcgtgaccgccgcgggcattactctcggcatggacgagctatacaaacgttctcgtgatataagccatggatttcctcctgctgtcgctgcccaagacgacggcaccctgcctatgagttgcgctcaggaaagcggcatggacaggcatcccgccgcctgcgctagcgctcgtattaacgtctaa

SEQ ID NO: 95 - DNA, 855 bp, Artificial Sequence
  Modified Open Reading Frame
atggttagcaagggtgaggagctcttcacaggagtagtgcccattctcgtggagttagatggagacgtgaacgggcataaattctcagtgagtggagaaggagaaggcgatgctacttatggcaaattaacactcaagttcatttgtactacagggaaacttcctgtgccctggccaactttggtgacgacactcacatacggagtgcaatgcttctcaaggtaccctgatcacatgaagcagcatgacttcttcaagagcgcaatgccagaagggtatgtccaggaacggactatcttcttcaaagatgatggcaactacaagacacgggcagaagtaaagttcgaaggagatactctagtaaacagaatcgagcttaaaggaattgacttcaaggaggatggtaacattctaggccacaagctcgaatacaattacaactctcacaacgtttacattatggccgataagcagaagaatggaattaaagtaaatttcaaaatcagacacaacatcgaggacgggagcgtgcagttagccgaccattaccaacaaaacacgcctattggagacggacccgtgctgttacctgacaatcactacctgagcacacagtccgccctgtcgaaagacccaaacgagaagcgagaccacatggtcttgctggagtttgtgacagccgctggtataactctcggaatggatgagttgtacaaacgatcccgggacattagccacgggtttcctccagctgtggccgctcaggatgatggcactcttcctatgtcctgcgctcaggaatccggcatggaccggcatccggccgcttgtgcgtctgccagaattaatgtataa

SEQ ID NO: 96 - DNA, 855 bp, Artificial Sequence
  Modified Open Reading Frame
atggtctcgaaaggtgaagaactgttcactggagtggttcccatactggtggaactggacggtgatgttaacggccacaagttctctgtgtccggtgagggagagggcgatgcaacttacggtaagctgactctcaaattcatttgcacaacaggcaagttgcctgtaccttggcctacgttggttaccacgctcacttatggagtgcagtgcttctcaaggtacccggatcacatgaaacaacacgacttctttaagagtgcgatgcccgagggatatgtgcaggagaggaccatcttcttcaaagacgacggtaattacaagacgagagcagaagtgaaattcgagggtgacactctggtgaatcgtatcgagcttaaagggattgactttaaggaagacgggaatatccttggacataaactggagtacaattacaactcccacaacgtgtacattatggcggataagcaaaagaacggaattaaagtgaatttcaagattcgacacaatattgaggatggtagcgtgcagctggccgatcactaccagcagaatacgccaatcggtgatggcccagtgttgctccctgacaaccattacctgtcaacccagtcggctttgagtaaggatcccaatgagaaaagagatcacatggtgcttctggagttcgttaccgccgccggaatcacactcgggatggatgagctctataagagatcccgggacatttcgcacggctttcctcctgctgtggcggcgcaggacgatgggacactccctatgtcctgcgctcaggagagcggcatggatcggcacccagctgcatgcgcgtcggctcggataaacgtgtaa

SEQ ID NO: 97 - DNA, 855 bp, Artificial Sequence
  Modified Open Reading Frame
atggtttcgaagggtgaggagttattcaccggcgtcgtgccgatcctagtcgagcttgacggagacgtgaacggacacaagtttagtgtgtctggcgaaggtgaaggtgacgccacttacggcaagcttacgttgaagttcatatgtaccactgggaaactcccagtgccttggcccacactcgtcactaccctgacctacggcgttcagtgcttctcgcggtaccctgaccacatgaaacagcatgatttcttcaagtcagcgatgcctgagggatacgtgcaagaaaggaccatcttcttcaaagacgatggtaactacaagaccagggctgaagtcaagtttgaaggcgacacgcttgtcaatcgaattgaacttaaaggcatcgactttaaggaggacggcaatatcctcggccataagctggaatacaactacaacagccacaacgtgtacattatggctgataaacagaagaatgggatcaaagtaaactttaagatccgtcacaacatagaagatgggtcagttcagctcgctgaccattatcaacaaaatactcccattggagacggccctgtgctcttgccagacaaccactatcttagcacccaatccgctctgtccaaggatcccaacgaaaagagggatcacatggttctgttagaattcgtgaccgcagcgggaataaccctcggcatggacgagctatacaagcgtagtcgagacatctcccacggctttccgcccgctgttgcggcgcaggacgatggaacattgccgatgagctgcgcccaagagtctgggatggacaggcacccagccgcatgcgctagtgcccgaattaatgtgtaa

SEQ ID NO: 98 - DNA, 855 bp, Artificial Sequence
  Modified Open Reading Frame
atggtgagtaagggagaggaactgtttacgggagtggtgcctatcctggtagaactagacggcgacgtaaacggtcacaagtttagcgtttcaggtgagggagaaggtgacgctacgtatggtaaattaacgctcaaatttatttgtactaccggcaaactgcccgttccatggccgacgctagtgaccactttgacgtatggcgtacaatgcttcagcaggtatcccgaccacatgaagcagcacgacttctttaagtcagctatgcctgagggatatgtgcaagagaggactatattctttaaggacgatggcaattataaaacccgtgcagaagttaagttcgaaggtgataccctagtcaacaggattgaactaaagggcatcgatttcaaagaggacggcaatatccttggtcacaagctcgagtacaactacaatagccataacgtctatatcatggccgataaacaaaagaatggtattaaagtcaactttaagatccgtcacaacatcgaggatggatcggtgcaacttgccgaccattaccaacagaatacaccaattggagacgggccggtactattgccggacaaccattatttgtctactcagagtgcactctcgaaggatcctaacgagaagagagatcatatggttcttctcgaatttgtcaccgcagcaggcatcacgctgggcatggatgagctgtacaagcgctcgcgagatatctcgcacggtttcccgccggccgtcgctgcacaggacgatggcacgcttccaatgagctgcgctcaagagtctggtatggacaggcacccagccgcctgcgcctcagcccgcatcaacgtctaa

SEQ ID NO: 99 - DNA, 855 bp, Artificial Sequence
  Modified Open Reading Frame
atggtcagtaaaggagaagagctgttcaccggagtagtgccaatcctagttgagctagacggcgatgtcaatgggcacaagttcagtgtcagcggcgagggagaaggagacgcaacttacggaaagctcaccttgaaattcatctgtaccaccggaaagttgcccgtgccgtggcctaccctagtaaccaccctcacatacggagtgcagtgcttcagtcgctaccctgatcatatgaaacaacacgacttctttaagtccgccatgccagagggctacgtccaggagagaactatcttctttaaggacgatggcaactacaaaacgcgagctgaagtgaagttcgagggagatacgttagtaaaccgcatcgagctgaaaggcatagacttcaaggaagacggcaacatcctcggccataaactggagtacaattacaactcacataacgtttatataatggccgataagcagaagaatggcatcaaagtgaacttcaaaatccgtcacaacatcgaagatggaagcgtacagcttgctgatcattatcagcagaacactccaatcggtgacggacctgtgttattaccagacaatcactatctgagcacgcagagtgctcttagtaaagatccaaacgagaagagagaccacatggttctgctcgagtttgtgaccgccgccgggattaccttgggaatggacgagctgtacaagcgtagtagagatattagccacggctttcctccagcagtggctgcccaagatgacggtacactgcccatgtcatgcgcacaggagtcaggaatggaccgacatccggctgcctgcgctagcgcgaggatcaatgtctaa

SEQ ID NO: 100 - DNA, 855 bp, Artificial Sequence
  Modified Open Reading Frame
atggtgtctaaaggcgaagaattgttcaccggcgtggtcccaatccttgtcgaactggatggagacgtcaacggacacaagttcagtgttagtggcgaaggcgaaggagacgcaacctatggaaaacttactctcaagtttatttgcacgactgggaaactccctgttccatggcctacattggtaacaaccttgacttacggcgtgcagtgcttcagtcgctatcctgaccatatgaagcagcatgatttcttcaaatcggcaatgccagagggttatgtgcaggagcggacgatcttcttcaaggatgatgggaactacaagactagggccgaggtgaaatttgagggcgacaccctggtgaatcgtatcgagctcaagggcattgactttaaggaggacggtaacatcctgggacacaaactcgaatataactacaattctcataatgtttacattatggccgacaaacaaaagaacggcataaaggtcaactttaaaattagacacaatatagaggacgggtccgtgcagctggcagatcactatcaacaaaatacacccattggagatggtccagtcctgctaccggataaccactatctcagcacgcagtcagctctcagcaaggatcccaacgagaaaagggatcacatggtactgcttgaattcgtcactgccgctgggattacactcggaatggacgagttgtataagcggagtcgagatattagtcatgggtttccgccagcggtggctgctcaggacgacggtaccctgcctatgagctgcgctcaggagtcgggtatggatcggcatcccgcggcttgtgcctcagcgaggatcaatgtgtaa

SEQ ID NO: 101 - DNA, 855 bp, Artificial Sequence
  Modified Open Reading Frame
atggtgagtaaaggcgaggagctgtttaccggagttgtgccgattctggttgagctcgacggcgatgtcaacggacacaagtttagcgtatcgggagagggcgaaggtgatgcgacctacggcaagctaaccctcaagttcatttgcactaccgggaagttaccagtgccatggccaactttggttactacattgacctacggcgtgcagtgcttcagtcggtatcctgaccacatgaagcaacatgatttcttcaagagcgcaatgcccgagggctatgttcaagaaagaacaatcttctttaaagacgatggaaactacaaaactagagctgaagtgaagtttgaaggcgataccttagtcaatcgtattgagctgaaagggatcgacttcaaagaggacggtaacatccttgggcacaaattggaatataactacaactcccataatgtctacattatggccgataagcagaagaatggcatcaaggtcaatttcaaaatccgccacaatatagaggatggctctgtgcaattggccgatcactatcagcaaaatactccgatcggagatgggcccgtcctgctgcccgacaaccactacttgagcactcagtctgccctgtctaaagatccgaacgagaagagggatcatatggtcttgctggaattcgtaaccgccgccgggatcacactaggtatggatgagttatataagcgctcgagagacatcagccatggctttccacccgccgttgccgctcaggatgacggcactctgcccatgagctgcgctcaggagagtgggatggataggcaccctgcggcatgcgcctcggcacgcataaacgtttaa

SEQ ID NO: 102 - DNA, 855 bp, Artificial Sequence
  Modified Open Reading Frame
atggtctccaaaggagaggagctgttcaccggtgtggtgcctatactggttgagttggatggcgatgtgaatggacacaaattctctgttagcggtgaaggagaaggtgatgccacctacggtaaattgaccctgaagtttatatgcaccacaggcaagttgcctgtgccatggcccaccctcgtgacgactcttacatacggagtgcagtgcttctcacggtatcctgaccacatgaaacagcatgatttcttcaaatccgcaatgcccgagggctacgttcaagaacgcacaatcttctttaaggatgacggaaactacaagactagagccgaagtaaaattcgagggcgatacgctcgtgaaccgcatagagctgaaaggcatcgacttcaaggaggatggtaacatattaggtcataagcttgaatataactataactcccataatgtgtatatcatggcggacaagcaaaagaatgggattaaggttaactttaaaatccggcacaatatcgaggacggaagtgtccaactagctgaccactaccaacaaaatactccgataggagatgggcccgtgctcctgcctgacaatcactacttgtcaactcagtctgcattgagcaaagacccaaatgagaaacgggaccatatggtgttgctggaattcgtaacagccgctggtataaccctcggcatggacgaattatataagcggtcaagggatattagccatgggtttccacccgccgtcgctgctcaagacgacggcacactcccaatgagttgtgcacaggagtcgggcatggaccgtcatccagcagcatgtgcctcagcaaggattaatgtctaa

SEQ ID NO: 103 - DNA, 855 bp, Artificial Sequence
  Modified Open Reading Frame
atggtcagcaaaggagaagagctgtttacgggtgtcgtgcccatactcgtcgaactagacggtgacgtgaacggtcataaattcagtgtgagcggcgagggcgagggagacgccacttacgggaagctgacactgaaatttatttgcaccacaggcaagctgccagtcccatggccaacactggtgaccactctcacctacggagtacagtgcttcagcaggtatcctgaccacatgaaacagcacgacttctttaagtcagcaatgcccgagggttacgtccaagagcgtacaatattcttcaaagacgatggcaattataaaactagagccgaagtgaaatttgaaggcgatactcttgtcaatagaattgagctaaaaggtatcgactttaaagaggacgggaacatacttggccacaagctcgaatacaattacaattcacataacgtatacatcatggcagacaaacaaaagaatggaataaaggttaacttcaagatacggcacaatattgaggatggttctgtacaattagcagatcactaccaacagaatacgccgatcggagacggtccagtcctcctcccagataatcattacctcagcacacagtccgccctttccaaagaccctaatgagaaacgggaccacatggtgctcctggagttcgtgactgctgccggaatcacgttagggatggatgagctctacaaacgctctcgagacataagtcatggctttccgcccgcagtggctgcgcaggacgatggcacgttaccaatgtcctgcgcgcaggagtctggcatggatcgacatccggccgcatgtgccagcgctcgcataaatgtgtaa

SEQ ID NO: 104 - DNA, 855 bp, Artificial Sequence
  Modified Open Reading Frame
atggtatccaaaggagaagagttgtttacaggcgtagtaccgattctggtggagctggatggcgacgtcaacggccacaagttctccgtctctggtgaaggcgagggcgacgcgacctacggtaagcttaccctaaagtttatctgtactaccggaaaattgccagtcccatggccgaccctcgttacaaccctcacttacggagttcagtgtttctccagatatccagaccacatgaagcagcatgatttctttaagtctgcaatgccggagggttacgtgcaggagcgtaccatattcttcaaagatgatggcaattataaaactcgggcagaggtcaagtttgagggagacacattggtcaacagaattgaactcaaaggaattgatttcaaggaggatggtaatatcctcgggcacaaactggaatacaactacaattcacacaacgtgtatatcatggccgataaacagaagaatgggatcaaggtaaacttcaagatccgacataatatcgaagacggcagcgtgcaacttgcggaccactaccagcagaacacgccaattggagacgggcccgtactccttcccgataaccattacctgtctacccagagcgccctctctaaagatccgaatgaaaagcgtgaccatatggttctgctggaattcgtaactgccgcagggatcacccttggcatggacgaactctataagcgttccagagacatctcacatggattcccacctgctgtagcagctcaggatgacggaaccctacctatgagctgtgcccaggagtctggcatggacagacatcctgcggcgtgcgcctccgctagaattaatgtttaa

SEQ ID NO: 105 - DNA, 855 bp, Artificial Sequence
  Modified Open Reading Frame
atggtatcaaaaggagaagagctgtttactggagtggtacctattctagttgaactggatggagacgttaatggacacaaatttagtgtgagcggtgagggagagggtgatgccacctacggtaagttaaccctgaagttcatttgcactacgggtaaactgcctgtcccgtggcctacgttggtcaccacgctgacttatggagttcagtgcttcagcagatatccagaccacatgaagcagcacgacttctttaaatcggcaatgcctgaaggttatgtccaagagcgtaccatcttcttcaaagatgacggcaactacaaaacccgagccgaggtgaagtttgagggagataccctggtgaaccgcattgagcttaagggcattgatttcaaggaagacgggaatatcttaggacataagctcgagtacaattacaactcacacaacgtgtatataatggcggataagcaaaagaacggcattaaggtaaacttcaaaatacggcacaatatcgaagatgggtcggtccagctggctgatcactatcagcaaaatactcctatcggcgacgggcccgtcctgctgcctgacaaccactacctgtctactcagtcggctctgtctaaagacccaaatgagaagcgcgaccacatggttcttctggaattcgttaccgcagcaggcatcacccttggtatggatgagttgtacaagcggagcagagatatttcacatggctttccgccagctgtggcagcccaagacgacgggacgctgcctatgtcatgcgcccaggagtctggaatggaccgacatcccgctgcgtgcgcatccgctcgaattaacgtgtaa

SEQ ID NO: 106 - DNA, 855 bp, Artificial Sequence
  Modified Open Reading Frame
atggtttcgaagggtgaagagctcttcacgggcgtggttccgatccttgtggaactggatggagatgtaaacggccacaagttcagtgtttcgggtgagggcgaaggcgacgcgacctatggaaaattgacactcaaattcatatgtaccacgggtaaactaccagtgccgtggccgactctagtgaccacgttaacgtacggtgtccagtgcttcagccgttacccagatcatatgaagcaacacgacttctttaaatcagctatgcctgaagggtatgtacaggaaagaacaatattctttaaggacgacggcaactacaaaacaagagccgaggtgaaattcgaaggcgacactttagtgaaccgaatcgagctaaaaggtatcgatttcaaggaggatggaaacattcttggacataagttagaatacaattataatagccacaatgtctacatcatggcggataaacaaaagaatggtatcaaggtgaatttcaaaattcgccacaatattgaggatggtagcgttcagctggccgaccattatcagcagaacacaccgatcggagacggacccgtcttgctcccagacaaccactatttgagcacccagagcgccctgtcgaaagatccgaacgagaagcgtgatcacatggtcctactagagtttgtaaccgctgccggcataaccttaggcatggacgaactctacaagcgctctagggatattagtcatgggtttcctccagctgtggccgcccaggacgatggaacactgcccatgagctgcgctcaggagagcggcatggaccgacacccagccgcctgcgcatcggctcgaattaatgtctaa

SEQ ID NO: 107 - DNA, 855 bp, Artificial Sequence
  Modified Open Reading Frame
atggtctcaaagggagaagagctattcacaggcgtagttcctatattggtcgagctcgatggcgatgttaatgggcataagttcagcgtgagtggcgaaggagaaggagatgccacctacgggaagttgacacttaaatttatctgcactacaggtaagctacccgtcccatggcccacacttgtgactacgcttacgtacggagttcagtgtttctcgcgctatcccgaccacatgaaacagcacgacttcttcaaatctgctatgccagagggatatgtccaggaacgtaccatcttcttcaaagacgatggaaattacaaaactcgcgcagaagtaaaattcgaaggtgacacactcgtaaataggatcgaattaaagggtattgactttaaagaggatggtaatattctgggccataagctagaatataactacaattcccacaacgtatatatcatggccgacaaacagaagaacggaatcaaggtaaactttaagatccggcacaacattgaggatgggtcagttcagttggctgaccactaccagcaaaacactccaataggcgatggccctgtgttgctgccagacaaccactacctgtcgacgcaaagtgccttgtctaaagatcctaacgagaaaagagaccatatggtactgctggaatttgtgacggccgccggaatcacgttaggaatggacgagctctacaaacggtcaagagatatatcgcatggctttccaccggcggttgctgcacaagatgacgggacactgcccatgtcctgtgctcaggaaagtggcatggaccgccatcccgccgcatgcgcaagtgctcgtatcaatgtctaa

SEQ ID NO: 108 - DNA, 855 bp, Artificial Sequence
  Modified Open Reading Frame
atggtatcgaaaggagaagagttgttcacgggtgtcgtaccaatactggtggaattagacggcgatgtcaacggccataaatttagcgtgtccggagagggagaaggagacgcaacttatggaaaattgactctgaaatttatctgcaccacgggcaagttgccagtaccgtggccgacgctggtcaccactcttacctacggcgtacagtgcttctccagatatcccgaccatatgaaacagcatgacttcttcaaatccgccatgccggagggatacgtgcaagaaagaacaatcttcttcaaggacgacggaaactacaagactagggccgaagttaaattcgaaggtgatactttagtgaacaggatagaactgaagggcatcgacttcaaagaagacggaaacatcctgggtcataaacttgaatacaattacaactctcacaatgtctacatcatggctgacaaacaaaagaatggaattaaggtaaactttaaaatcagacacaatatagaggatggatcagtgcagctagcggaccactatcagcagaatactcctattggagatggacctgtccttctacctgacaaccattatcttagtacccaaagcgctttgtcaaaagatccgaacgagaagcgggaccatatggtcttactggaattcgtgacagccgctgggattacactcggcatggatgagctttacaagcgatcccgggacataagtcatggcttccctccagcggtcgctgctcaagacgacgggacccttccaatgtcttgtgcccaagaatccgggatggaccgccatcccgcagcttgtgcatccgcacggattaatgtctaa

SEQ ID NO: 109 - DNA, 855 bp, Artificial Sequence
  Modified Open Reading Frame
atggtgtcaaagggtgaagaactgttcacaggtgtggtacccatattggtcgaactggacggcgacgtaaatggacataagttctccgtatctggcgaaggtgagggagatgcgacttacggtaaattaacgttaaagtttatttgcactacgggtaagttacctgtgccatggcctactcttgtgaccaccttaacatacggcgttcagtgcttctcaagatatcccgaccatatgaagcaacacgatttcttcaagagcgctatgcccgaaggttatgtgcaagaacggaccatcttcttcaaggacgacgggaattataagacaagagccgaggtaaagtttgagggcgatactctagtgaatcgcatcgaacttaagggcatcgatttcaaagaagacggaaacatcctgggccacaagctcgagtataactataacagtcataacgtgtacatcatggccgacaagcagaagaatggtattaaagttaatttcaagataaggcataatattgaggacggcagcgtccaattagcggatcactaccaacagaacactcccatcggtgatggcccggtgctgctgcctgataatcattacttatctacccagtctgcgcttagcaaagacccgaatgaaaagagagaccacatggtattactagagttcgtgaccgcggccgggattacactgggtatggacgagctgtataagcgtagtagagatatttcgcacggctttcctccagctgtcgcagcccaagatgatggcacacttcctatgtcatgcgcgcaggaatctggtatggatcggcatcccgcggcttgtgcctccgcgagaattaatgtgtaa

SEQ ID NO: 110 - DNA, 855 bp, Artificial Sequence
  Modified Open Reading Frame
atggtgtccaagggtgaagaactctttactggcgtggtgcccatcttggtggagctggatggcgacgtaaacggccataaattctctgtgtcgggagagggtgagggcgatgctacgtatggtaagctgacactgaagtttatctgcactacgggcaagcttcccgtgccctggcccacactggtgaccacattgacgtacggtgtacaatgctttagcagatacccagaccatatgaagcagcatgatttcttcaaatccgctatgccagagggctacgtccaggagcggactatcttctttaaagacgatggtaactataaaacgcgagctgaagtaaaatttgaaggcgacacattggtaaaccgtatcgagctgaagggcatcgatttcaaagaggatggcaacatcttgggccataaattggaatacaactataactcccacaacgtgtacatcatggcggataaacagaagaacggaattaaagtgaacttcaagattcgccacaacattgaggatggatccgtccaattggccgaccattaccagcagaacactcccatcggtgacggtccagtgctgctcccagataaccattatttgtcaacacagtccgctctgtctaaggatcccaacgaaaagagggaccacatggtgttgctggagtttgtaaccgcagctggaattacacttggaatggacgagctttataagcggtcgagggatatttcacatggctttccgcccgcagtagctgcccaggacgatggcacactacccatgtcctgcgcacaagagtctgggatggatcgccaccctgctgcgtgtgcaagtgctcggattaatgtgtaa

SEQ ID NO: 111 - DNA, 855 bp, Artificial Sequence
  Modified Open Reading Frame
atggttagcaagggagaggaattgttcaccggcgtggtgcccatcttagtagagctcgacggcgacgtcaacggtcacaagttctctgttagcggcgaaggcgagggagatgccacttacggcaagttaaccctaaaattcatctgcactacaggtaaactcccggtcccgtggcctacactggtgactactctgacttacggtgttcaatgcttctctcgctatccagaccatatgaagcagcatgacttcttcaagtcggcaatgcccgaaggttatgtacaggagaggacaatcttcttcaaagatgacgggaactacaagacgagggcagaggtaaaatttgaaggagacaccctggtgaataggatagaactcaaaggcatagatttcaaggaagatggcaacattcttggacataagcttgagtataactataattcacacaatgtctatattatggccgacaagcagaagaacgggatcaaagtgaatttcaaaataaggcacaacatagaggacgggtcagttcagctggcagatcattaccagcaaaacacacccatcggtgacggtccagtgctgctgcctgataatcactatttgtcgacacagtccgccctttccaaagatccaaacgagaaaagagaccacatggtgttgctggaatttgttactgccgctggtatcactctgggcatggatgaattgtacaagcgctcacgggatatatcccacggattcccaccagctgtcgcggcgcaggacgatggtacgctccctatgagttgcgcccaggaatctggtatggaccggcacccagcagcctgtgcttcagcgagaatcaacgtttaa

SEQ ID NO: 112 - DNA, 855 bp, Artificial Sequence
  Modified Open Reading Frame
atggttagtaagggcgaagaattgttcaccggcgtcgtgcctattctggtcgaattggatggcgacgtgaatggacataagttcagcgtgagcggagagggcgagggtgacgccacgtacggtaaattgaccttaaaatttatatgtaccactggaaaactgcccgtaccctggccaactctcgtaacaacactaacctatggcgtgcagtgctttagcagatatccggatcatatgaaacagcacgacttctttaaatcggctatgcctgagggctacgtgcaagaaaggacaatcttcttcaaagatgacggtaactacaaaacaagagccgaggtaaaattcgagggagataccttagtaaaccggatcgaactgaaaggcatcgactttaaggaagatggcaacattctgggccacaaactcgagtacaattacaattcccacaacgtatacatcatggcagacaagcagaagaacggaatcaaggttaactttaagattaggcacaatattgaggacggcagcgtgcaactggccgaccactaccaacagaatactcctattggcgatggacctgtgcttctgcccgacaaccactatctcagtacccagagcgcgctttctaaagatcccaacgagaagagggaccatatggtcttgctcgagtttgtgacagctgcagggatcactttaggaatggatgagttgtataaaagatcaagggacatctcccacgggtttccgccagctgtagcggcgcaggacgatgggacgcttcctatgtcttgcgcacaggaatcgggtatggaccgtcatcccgcagcatgtgcatcagcgagaattaacgtataa

SEQ ID NO: 113 - DNA, 855 bp, Artificial Sequence
  Modified Open Reading Frame
atggtatcgaaaggcgaggagctgttcacaggcgtggtgccgatcttggtggagcttgatggtgatgttaatggacataagttcagtgttagcggcgaaggtgagggagacgccacctatgggaagttgacattaaaatttatatgcaccacgggaaagttgcctgtaccgtggccgaccctggtgactaccttgacttacggcgtacaatgcttcagtaggtatcctgatcacatgaagcagcatgatttcttcaaaagcgccatgcctgaaggctacgtgcaggagaggactatattctttaaggacgacggcaactataaaacacgcgcagaggtaaagtttgagggagatacactcgtaaatagaatcgaactgaaagggattgacttcaaggaagacggcaatattcttggccataagctggaatacaattataactcccataacgtgtacataatggccgacaaacagaagaatggcatcaaagtaaacttcaaaattcgccataacattgaggacggatcagtacaacttgccgaccattaccagcagaacactccaataggagatggtccggtgctcttgccagacaaccactacctcagtacccaatctgctctgtctaaagatccaaatgagaagcgggaccatatggtgctcctagagttcgtcactgccgctggcattacgcttggaatggacgagctgtacaagaggtccagagacattagccatgggttcccgccggcggtggctgcacaggacgacgggaccctgccgatgagttgtgcccaggaatccggaatggatcgccatcctgccgcatgcgccagtgcccgaatcaacgtttaa

SEQ ID NO: 114 - DNA, 855 bp, Artificial Sequence
  Modified Open Reading Frame
atggtcagcaaaggagaagagctgtttacaggagtggttcctatcctcgtcgaattggacggagatgttaacggacacaagttctcagtgagtggtgagggtgagggcgatgcgacatacgggaagttaactctcaagtttatttgcactaccggcaagctgcccgtaccttggcctaccttagtgacaacacttacgtacggtgtgcaatgcttcagcagatatcccgaccacatgaagcagcatgatttctttaaaagcgccatgcctgaagggtacgtccaggagcggaccatcttctttaaggacgacggaaactataagacaagggccgaagttaaatttgaaggcgataccctggttaacagaatcgagctgaagggcatagactttaaggaggacggaaacatcctaggccataaactggaatataactacaacagccataacgtatacattatggcggacaagcagaagaacggaataaaggtcaactttaaaattcggcataacatagaggatgggtctgtccagctggccgaccactaccagcaaaatacaccaatcggagatggccctgtattgctacctgataaccattacctgtctacccaatcggccctgtctaaggatcccaacgagaaacgagatcacatggtcttacttgaatttgtgacagcagcagggattacgcttggaatggatgagctttacaaacggtccagagacatctcacacgggttccctcccgctgtcgccgcccaggacgatggcacattacctatgagttgcgcgcaggaatctggaatggatcgtcatccggccgcctgtgcatccgctaggatcaatgtttaa

SEQ ID NO: 115 - DNA, 855 bp, Artificial Sequence
  Modified Open Reading Frame
atggtgagtaaaggagaagagctgtttacaggtgtggtaccaatattggtagagctggatggcgacgtcaacgggcataagttcagtgtgagcggagaaggtgaaggagatgccacctacggcaaactgacgctcaagtttatttgtaccaccggaaagttacctgtaccatggcccacgctggtgacaacgttgacttacggagtccaatgctttagtcggtatcccgatcacatgaagcaacatgacttctttaagtcagctatgccggaaggctacgtacaagagagaactatcttcttcaaggacgacggcaattataagacacgggcggaagtaaagttcgaaggtgacaccctggtgaaccgcattgagctgaaaggtatagactttaaggaggacgggaatatcttaggtcacaagctcgagtacaattataatagccacaacgtatatatcatggcagacaagcagaagaatggcataaaggtgaacttcaaaatcagacataacatcgaagatggctcggtccagctcgctgatcattatcagcaaaacactccgatcggcgacgggcccgtgctgttacctgataaccactatctctctactcaatcagcactctcaaaggatccgaatgagaagagggatcacatggtgctattggagtttgtgacggctgccgggataaccttgggtatggatgaactttataaaagaagtagggacatctcgcatgggtttccgcctgccgtggccgcacaggatgacgggactcttccaatgtcttgcgcccaggagtcaggaatggatcgccatcctgctgcttgtgcctccgcccggattaatgtgtaa

SEQ ID NO: 116 - DNA, 855 bp, Artificial Sequence
  Modified Open Reading Frame
atggtgtctaagggagaagaactgttcacaggtgtggtgccgatattagtcgagctcgatggtgacgtaaatggccataaattctctgtctctggcgagggagaaggagatgccacgtatggaaaactaaccctaaaatttatttgtacgaccgggaaactaccggtcccatggccgacacttgtaacgacactgacctacggcgttcagtgtttctccaggtatcctgaccatatgaaacaacatgacttcttcaaatcagcaatgcccgagggctatgtccaagaaagaaccatcttcttcaaagacgacgggaattacaaaactagagcagaggtaaagtttgagggcgatacactcgtgaaccggattgagctgaagggcattgatttcaaagaggatggcaatatcctgggccacaagctggaatacaattacaatagccacaacgtatatattatggcagacaaacaaaagaacggcataaaggttaatttcaagatccgccacaacatcgaggacgggtcggttcagcttgccgaccattatcagcaaaacacacctataggtgacggtcctgtgctactgcccgataatcactatttgagtacccaaagcgcactatctaaagacccaaacgagaaaagggaccacatggttctactagagttcgttacagctgcgggcataaccttagggatggatgagctgtacaagcgctccagggatatcagccatgggtttccgcctgccgttgcggctcaggatgatggcacgctgcctatgtcctgtgcgcaggaaagcggtatggacaggcatccagcggcttgcgcgtcagctcggatcaacgtgtaa

SEQ ID NO: 117 - DNA, 855 bp, Artificial Sequence
  Modified Open Reading Frame
atggtgagcaaaggagaagagctgttcaccggcgtggtcccaatattagtcgagctcgatggcgacgttaatggacacaaattcagcgtgtccggtgagggcgagggcgatgctacgtacggaaaactaacgcttaagtttatctgcacgactgggaagctacccgtcccgtggccgaccttagttaccactcttacgtacggtgtgcaatgcttcagtcgataccctgaccacatgaagcagcacgacttctttaagagcgccatgcctgagggttatgtgcaagaacgtaccatattcttcaaggatgacggtaactacaagactagggctgaagtcaagttcgagggcgatacactggtgaaccgcatcgaattaaagggaattgactttaaagaggacgggaatattcttggacataagttggagtacaactataactcccataatgtgtacatcatggcagacaagcagaagaatggcatcaaagttaactttaagatccgacataatattgaggatggatctgtccagcttgctgaccactatcaacagaatacgccaatcggtgacgggcctgtgttgttacccgacaaccactacttgtcaacgcagtctgctctgtcgaaagacccaaacgagaagcgagatcatatggtcttgctcgaattcgttactgcagctgggattacactcggtatggatgaactatacaagagatctcgagatatttctcacggatttccacccgcagtggctgcccaagatgacggcacactgcccatgtcttgcgcgcaggaaagcggaatggatcgccacccagcggcctgcgcctcagcccgcataaacgtctaa

SEQ ID NO: 118 - DNA, 855 bp, Artificial Sequence
  Modified Open Reading Frame
atggtctcgaaaggagaggaactatttaccggcgttgttcccatcttggtggagctggacggagatgtgaatgggcacaagttcagtgtttcgggagagggcgaaggagatgccacctacggcaagcttacgctcaaattcatttgtacgactggtaagttacccgtgccttggcccacactggtaactacactgacatatggcgtccagtgcttctctaggtaccctgatcacatgaaacaacatgatttctttaagagcgccatgcccgagggctacgttcaagagagaaccatcttctttaaagacgacggcaactataagacccgggccgaggtcaaattcgaaggcgacacccttgtcaatcggattgaactgaagggcatcgatttcaaagaggacggcaacatcctcggtcacaaactggagtacaattataactcgcataacgtgtacatcatggccgacaaacagaagaacgggataaaagttaacttcaagattcggcacaatatagaggatggaagcgttcaattggcggatcactatcagcaaaacactcccataggagatggtccagtactcctgcccgataatcattacctgtcaacacaatccgctctgagtaaagatcctaacgagaagagagatcatatggtgttgctggagttcgtgaccgctgccggtattacacttgggatggacgaactctataaaagatctagagacatcagccacgggttcccacccgcagtggcagctcaagatgacggaaccctacctatgagttgcgctcaggagtccgggatggaccggcaccctgcggcatgtgcgagtgccagaatcaacgtttaa

SEQ ID NO: 119 - DNA, 855 bp, Artificial Sequence
  Modified Open Reading Frame
atggtttccaagggcgaggagctgttcactggcgtggtgcccatcttagtagagcttgatggcgatgtcaatggccataaattctccgtatcgggagaaggtgagggagatgctacctacggtaaacttacgctaaaatttatttgcacgacgggtaaactgccggtgccttggcccacactggtgaccacgcttacgtacggtgtccagtgtttctcacgctatcctgatcatatgaaacagcatgacttctttaagagtgcaatgcctgaaggctacgtgcaggaaaggactatcttcttcaaggacgatggcaattataagacccgagccgaggttaaattcgaaggagacactctcgtgaatcgtatcgagctaaagggcattgacttcaaagaggatggaaacatcctcggccacaagctcgaatacaactataactcccacaatgtgtacattatggctgacaaacagaagaacggcatcaaagtaaacttcaagatccggcataatatagaggacggctccgtgcagctagctgatcattatcagcagaacactcctataggagacggtcccgtgttattgcctgataatcattatctttccacgcagagcgccttatcaaaagatccgaacgagaagcgggaccatatggtccttctggagtttgtcaccgccgccggcattactctcggcatggacgaattgtacaaacgctctcgcgacatctcccacggatttccacctgctgttgcagcgcaggacgacggcactcttccaatgagttgcgcacaggagtcaggcatggatagacatccagcggcctgcgcttcagccagaattaacgtgtaa

SEQ ID NO: 120 - DNA, 855 bp, Artificial Sequence
  Modified Open Reading Frame
atggttagtaagggtgaggaattgttcacgggcgtggttcccattcttgtcgagctcgacggagatgttaatggtcacaaattcagcgtaagtggcgagggcgagggtgacgcgacctatggaaaactgaccctcaagttcatatgcaccacgggtaagctcccggttccttggcccacactcgtgaccacactaacctacggtgtccagtgcttctcgaggtacccggatcacatgaagcagcacgacttcttcaaaagtgccatgcctgaaggttacgtgcaggaaaggacgatcttcttcaaagacgacggcaactataaaactcgcgcggaggtgaagttcgaaggtgacaccctagtcaatcgcatagaactgaagggtatcgacttcaaagaagacggtaacatactgggtcataaactcgagtataattacaactcgcataacgtctacataatggctgataaacagaagaacggcatcaaagtcaatttcaagatacgacacaacattgaggatggcagcgtccaactggcggatcactatcagcaaaacactcccataggtgacggccctgtactgctcccagataaccactacctcagcacacaaagtgcactgagcaaagaccctaacgagaagagagatcatatggttctgttggaatttgtcacggctgccggcatcacgctcgggatggacgagctttataagagatcgcgcgatatctctcatggctttccaccagccgttgccgctcaggacgacggtacactaccaatgagctgtgcacaagaaagcggcatggacagacatccagcagcctgtgcgagcgctcgcatcaacgtctaa

SEQ ID NO: 121 - DNA, 855 bp, Artificial Sequence
  Modified Open Reading Frame
atggtttcaaagggcgaggagctgtttaccggcgtggtgcccattctcgtagaattggatggcgatgtcaatggacataagtttagtgtgagtggagaaggagagggcgatgctacgtacgggaaattaacactcaagtttatatgtacgaccgggaaacttccggtgccttggccgactctggttaccacgctcacctatggcgtccagtgcttctctaggtatccagatcacatgaaacagcacgacttctttaagtctgcaatgcccgagggttacgtgcaggagcggacgatattcttcaaagacgacggtaactataaaacaagggccgaggttaagtttgaaggcgatactctcgtaaaccgcattgagctcaagggaattgatttcaaggaagatggcaacattctcggccacaagctcgagtacaactataatagccacaacgtgtacatcatggccgataaacagaagaacggtattaaagttaatttcaaaataagacataatattgaggacggtagcgtccagctagctgaccactaccagcaaaacactcccataggagatggtcccgttctgcttccagacaatcattatctcagtacccaaagtgcccttagcaaggaccctaacgaaaagcgggatcatatggtcttgctggagtttgtgactgccgcaggcataacactagggatggacgagctgtataaaagatccagggacatatctcatgggtttccaccagcggtagccgctcaagacgatgggaccctcccgatgtcttgcgcccaggagtctggaatggatcgccatccagcagcctgtgctagtgccagaattaatgtgtaa

SEQ ID NO: 122 - DNA, 855 bp, Artificial Sequence
  Modified Open Reading Frame
atggtgtctaaaggagaggaactgttcacgggtgtggtccctattctcgtcgaactagacggtgatgtgaatggccacaaattctccgtctcaggagagggagaaggcgacgcgacgtacggaaaattgaccttgaagttcatctgtaccaccgggaaactgcctgtgccctggccgacattagtcaccacgctgacctacggtgttcaatgcttctctcggtatcctgaccatatgaaacagcacgacttcttcaaatcggctatgccagagggatacgttcaggaaagaacaatcttctttaaggacgatggtaactacaaaacacgcgctgaggtaaagttcgagggagacactctagtgaatcggattgagcttaagggtattgacttcaaggaggacggaaatattctaggtcataagctagaatacaactataactcgcataatgtctacattatggccgacaaacagaagaatggcatcaaggtgaacttcaagatacgtcataacatagaggacggcagcgtgcagctagctgatcattaccagcagaatacacctattggcgatggacctgtgctattacctgataatcactatttaagtacccagtcggctctcagtaaggatcctaatgaaaagagagatcacatggtccttctggagttcgtgacagcagcagggataaccttgggcatggacgaattgtataagagatcacgcgacatttcacacggatttccgcccgcagtggcagcgcaggatgacgggactcttccaatgagctgcgcacaagaatcgggcatggataggcacccagcagcttgcgcatctgctcggataaatgtctaa

SEQ ID NO: 123 - DNA, 855 bp, Artificial Sequence
  Modified Open Reading Frame
atggtgtcgaagggtgaagaattatttacaggcgtagtgcctatcctcgtggagctagatggtgatgtgaatggccacaaattctcagtgagtggagagggagagggtgatgcaacctatgggaagcttaccctaaagttcatctgcacaacgggcaaacttcctgtcccatggcccacactagtgacaacactgacgtacggcgttcagtgtttctctcggtatccggatcacatgaagcaacacgatttctttaagtctgccatgcccgaaggttacgtgcaggaacgcacgatcttctttaaagacgacggtaactataaaacaagagcagaagtgaaatttgaaggcgataccttggtaaacagaatagagttaaaaggaattgatttcaaggaagatgggaacatcctgggacataaactggaatataattacaattcgcataatgtgtacataatggctgacaaacagaagaacgggattaaagttaatttcaaaatccggcataatatagaagacggctctgtacagttggcagaccattaccagcagaatactcccatcggcgacggacctgtactgctgcccgataatcattacctctctacacagagtgccctatccaaagatccgaacgagaaacgagatcacatggtactcctcgaatttgttactgctgcgggaataactttaggcatggatgaactgtacaaacgttctagagacatttctcatggatttccaccagccgttgccgctcaagatgatggaacgctcccaatgagctgtgcccaagagagcggcatggataggcatcccgcggcttgcgcctctgcgcggatcaacgtgtaa

SEQ ID NO: 124 - DNA, 855 bp, Artificial Sequence
  Modified Open Reading Frame
atggtgagcaagggtgaagaattatttacaggagtcgtgccgatattggtggaactcgatggagatgttaacggtcacaagttctctgtgtctggtgaaggcgagggcgatgctacctatggcaaactgaccctgaagttcatttgcaccactggtaagctacccgtaccctggcccaccctagttacgaccttgacatatggcgtgcagtgtttctctagatatccagatcatatgaagcaacacgatttcttcaaatctgccatgccggaagggtacgtgcaagaacgtactatcttcttcaaagacgacgggaactataagacacgcgctgaagttaagtttgaaggagacacgctcgttaatagaattgaattgaaaggaatcgacttcaaggaggatggcaatattcttggacataagctagagtacaactataacagccataacgtctacataatggccgataagcaaaagaacggcataaaggtgaatttcaagatccgccacaacatcgaagatggttcagtacaactggcagatcactatcagcagaatacacctatcggcgacggtcctgtgctgctacccgacaaccattacttaagcacccagagtgctctctctaaggatcccaatgagaaaagggaccacatggtcctactggagtttgtgacagcggctggtattactctcgggatggatgaattatacaaaaggagcagagatatcagtcacggattcccacctgcagtagccgcacaagatgatgggacgttgcctatgtcatgcgctcaagaatctggaatggatagacatccggcggcttgtgcatcggctcgaatcaacgtgtaa

SEQ ID NO: 125 - DNA, 855 bp, Artificial Sequence
  Modified Open Reading Frame
atggtctccaaaggagaagagctctttacaggcgtagtgcctatcctggtcgagttggacggagacgtaaacggccataagttctccgtgagcggagagggcgaaggtgacgctacttacggtaaactcacccttaaatttatttgtactacaggaaagcttcctgtgccctggccgactttagtaacgaccctaacgtacggcgttcagtgcttctctagatacccggatcatatgaaacagcatgacttcttcaaatccgcgatgccagagggatacgtccaggaacggaccatcttcttcaaagatgatgggaattataagactagagccgaagttaaattcgagggcgacactctcgtgaatcgtattgaactgaagggaatcgacttcaaggaggacgggaatatcctgggtcacaaacttgagtataattataacagccataatgtatacatcatggccgataaacagaagaatggtatcaaagtgaactttaaaattcgacataatatcgaagacggatctgtgcaattggcggaccactaccagcaaaatacacccattggcgacggaccagtgctcctacctgataaccattatctgtccactcagtccgccttgtcaaaggacccaaatgaaaagcgagaccatatggttctgctagagttcgtcacagctgccggcatcacgctcggtatggacgaactctataagcggtccagagacattagtcacgggttccctccagcggttgccgcccaagacgatggtaccttgccaatgtcctgcgctcaggagtccggtatggacaggcatcccgccgcatgcgcatcggcgcggataaatgtgtaa

SEQ ID NO: 126 - DNA, 855 bp, Artificial Sequence
  Modified Open Reading Frame
atggtgtcgaaaggcgaagaattatttaccggcgttgtgcccattctggtggaacttgacggagacgtgaacgggcataagttcagcgtgagcggtgaaggagagggtgacgccacctatggcaagctgacgctgaagttcatctgtactactggcaagctaccagtgccttggccaaccttagttacgacactcacgtacggcgtccagtgcttctcccgctacccggaccacatgaaacaacacgacttcttcaaatcagcaatgcctgagggctacgtgcaggaacgaacaatcttcttcaaggatgacggcaattataaaactagagctgaagtgaagttcgagggcgacacgctggtcaaccgtatcgaactgaagggtatcgactttaaggaagatgggaatattctcggtcacaagttggaatacaattacaattctcacaacgtttacatcatggccgataagcaaaagaatggaataaaggtaaactttaaaattaggcataacatcgaggacgggtcggtccaacttgctgaccattatcaacaaaacactccgattggcgatggtccagttctcctccctgacaaccactatctctccactcagtcagcattatcgaaggaccctaatgagaagcgagatcatatggttctcctggagtttgtgacagcggctggcatcaccttaggcatggatgaactctataaaaggagtcgggacatcagccacggcttcccacccgccgtagcagctcaggacgacggcacactacccatgagctgtgcgcaggagagtggtatggatcgccacccagctgcatgtgccagcgcaagaatcaatgtataa

SEQ ID NO: 127 - DNA, 855 bp, Artificial Sequence
  Modified Open Reading Frame
atggtctccaaaggcgaagaattatttacgggcgtcgtccctatccttgttgagttggatggcgacgttaacggtcacaagttcagcgtcagcggtgaaggagaaggtgatgcaacatacgggaagctaacactaaagtttatctgcaccactggtaaattacccgttccctggcctaccttagtcacaacgctgacatacggagttcaatgtttctcccggtatccagaccacatgaaacagcacgacttcttcaagagtgcgatgccggaagggtacgtacaagagaggaccatattctttaaggacgacgggaattataaaaccagggcggaggtaaagttcgaaggagatacattagtaaacaggatcgagctgaaaggtatcgatttcaaggaagatggtaacatcctaggccataaactagagtataactacaattctcataatgtgtacataatggccgataaacagaagaatggcattaaagtaaactttaaaatcaggcataacattgaagacggctcagtccaactggcggatcactatcaacaaaatactcccatcggcgacggtccagttctcctcccggataaccactacctgtctactcaatccgctcttagcaaagacccaaatgagaaacgcgaccatatggtcctattggaattcgtcaccgctgcagggattactctcggaatggacgaactgtacaagagatcccgagacatatcccacggattcccgcccgctgttgccgcacaagacgatggcaccttgcccatgtcttgtgcgcaagaaagtggaatggacaggcatcccgctgcttgcgcttccgccagaattaatgtttaa

SEQ ID NO: 128 - DNA, 855 bp, Artificial Sequence
  Modified Open Reading Frame
atggtgtctaaaggcgaagaattattcacaggtgtcgtgccaatcttagttgaactagatggagacgttaatgggcacaaattctccgtgtctggcgaaggtgagggcgacgccacatacggcaagttgaccttaaaatttatctgcaccaccgggaaattaccagtgccatggcccaccctggtaactacacttacatatggagtgcagtgcttctctaggtacccggaccacatgaaacagcatgatttctttaaatccgcaatgccagaaggatatgttcaggagaggaccatcttctttaaggacgacgggaactataagacccgagcagaggtgaaatttgagggtgacaccctcgtcaatcgcattgaactgaagggaatcgactttaaggaggatggtaacattctgggccataagctagaatacaattataacagccacaacgtctatattatggccgataaacaaaagaatggaatcaaagtcaatttcaaaattagacacaatattgaggatggaagtgtacagttggctgaccactaccagcagaatactccaattggtgatggtcctgtgctactgcccgataaccactatctttccacccagtccgcattgtccaaagatccaaatgaaaagagggaccatatggtgctactagagttcgtaacagcggctggaataacgctgggaatggatgagctgtacaagcgttctagagatatctcccacggattccctccggcagttgcagcccaggatgacggcaccctcccaatgtcttgcgctcaggagtccggaatggatcgtcatccagcggcgtgtgcgtcagccagaatcaacgtgtaa

SEQ ID NO: 129 - DNA, 855 bp, Artificial Sequence
  Modified Open Reading Frame
atggtaagcaagggtgaagagctatttacaggagttgtcccaatcctggttgaactggacggcgatgttaatggccacaagttctccgtatcgggagaaggagaaggtgatgcaacttacggcaagctcaccttgaagttcatttgtaccactggcaaactccctgtcccatggcccacacttgtaactacgctaacatatggtgtgcaatgtttctcccggtacccagatcatatgaagcaacatgacttcttcaaatctgctatgcccgaaggatatgtgcaggaacgtaccatcttctttaaggacgacggaaactacaagacccgagccgaggtcaaatttgagggagatactctggtcaaccgtatagagctcaaaggaatcgatttcaaagaagatggtaatattcttggtcacaagcttgagtacaattataactctcataatgtgtacattatggcagacaagcaaaagaacggaataaaagtaaactttaagattcggcacaatatcgaggacggatccgtccagttagccgaccattaccagcagaacacacccatcggtgatgggcccgtgcttcttcctgataatcattatctctcgacacagtccgccctgtctaaggatccgaatgagaaaagagaccacatggtgctgttagagttcgtcaccgcagctggcattacactaggcatggacgaattgtacaaacgttcaagggacatatcgcacggctttccgccggctgtcgctgcccaagatgacggtacgctgccaatgtcctgtgctcaggaaagcggcatggaccggcatcccgcagcctgcgcctctgctcgtatcaatgtgtaa

SEQ ID NO: 130 - DNA, 855 bp, Artificial Sequence
  Modified Open Reading Frame
atggtatcaaagggcgaggagctatttacgggtgttgtcccaatattagtggagctggacggcgatgtaaatggccacaaattctctgtgagtggagaaggcgaaggtgacgccacctacgggaaacttacccttaaatttatctgcactacgggcaagctgcccgtaccgtggcccaccctggttactaccctcacgtatggagtgcagtgtttctcacgatatcccgaccatatgaaacaacatgatttcttcaaaagtgctatgccggaaggctacgtccaagaacgcacaatattctttaaggatgatgggaattacaaaaccagagccgaggttaaattcgagggtgacaccctcgtgaatcggattgagctcaagggcatcgatttcaaagaagatggcaatatcttaggccacaagttagaatataactacaattctcacaacgtgtacataatggcggacaaacagaagaacggtataaaggtcaacttcaagattcggcacaacatcgaagatggtagcgtgcagctggccgaccattatcagcaaaatacaccgatcggagacggtccagtgctcctcccagataatcactacctttcaacgcagagtgccctgtctaaggatccgaatgagaaacgagatcatatggttctactggagtttgtgacagccgctgggatcacgctgggcatggatgaattgtataaaaggtcccgtgatatcagtcacggattccctccagcggtagctgctcaggacgacggtaccctgcccatgtcctgcgctcaggaatccgggatggatagacatccggcagcgtgtgcgtccgccagaattaatgtctaa

SEQ ID NO: 131 - DNA, 855 bp, Artificial Sequence
  Modified Open Reading Frame
atggtatcgaagggtgaggagttgttcacaggcgttgttccgatcctcgtagaacttgacggagacgtcaacggtcataaattcagcgtatcaggcgagggcgaaggtgacgcgacttatggcaaattaactctcaagttcatctgcactactggcaaacttcctgttccctggcccacacttgttactacccttacatacggcgtacaatgctttagccgttacccagatcacatgaaacagcacgatttcttcaaatccgccatgcctgagggttacgtccaggaaagaacaatattctttaaagatgacgggaactacaagacaagagcggaggtgaagtttgagggcgatactctggtgaatagaattgagctaaaaggaatcgacttcaaagaggatggaaatatcctgggtcataaactggagtataactacaatagtcataatgtatatataatggccgacaagcagaagaatggaattaaagtgaactttaagattaggcacaacatcgaagatggtagtgttcagctggccgatcattaccaacaaaatactccgatcggcgacgggccggtcctgctgccagacaatcattatttatctacacagagcgcactatccaaagatcctaacgagaagcgagaccacatggttctgctagagttcgttaccgctgccggaattacactcggaatggacgaactttataagcgttctagggacatttctcacggctttccacctgccgtggcggctcaggatgatggaacacttcccatgtcctgcgctcaagagtctggaatggatagacacccagccgcctgtgcttctgctcgcataaacgtttaa

SEQ ID NO: 132 - DNA, 855 bp, Artificial Sequence
  Modified Open Reading Frame
atggtatctaagggtgaggaactctttacgggtgttgtgcctatacttgtcgagctcgacggtgatgtcaacggtcataaatttagtgtcagtggagaaggcgagggcgatgctacttacggtaagctcactctgaaatttatttgtactaccggcaaacttccagtgccctggccaaccctcgtgacgacacttacatacggagttcagtgctttagcagatacccagaccacatgaagcagcacgacttctttaaatctgcaatgcctgagggctatgtgcaggaaagaactatcttctttaaggatgacggaaattataaaaccagagcagaggtgaagtttgagggagatacacttgtaaataggatagagttgaaaggaattgactttaaggaagacggaaatatacttgggcacaagctcgaatacaactacaactcccataatgtctatatcatggctgataagcagaagaatggaattaaggtaaactttaaaatcagacacaacattgaagatggaagtgtacagctagcagatcactaccaacaaaatacacctatcggagatggccctgtgttacttcccgataaccactatctctcgacacaaagcgcgctgtccaaggacccgaatgagaaacgcgaccatatggtgctgctcgaatttgtgacagctgctggtattactctcgggatggatgaactgtacaaacgttcaagggatataagccatggctttccacccgccgtggctgcccaggatgatggcactctgccaatgtcatgtgctcaggaatccggcatggataggcacccagctgcttgcgctagtgccaggatcaacgtgtaa

SEQ ID NO: 133 - DNA, 855 bp, Artificial Sequence
  Modified Open Reading Frame
atggtcagcaaaggagaagagctgtttacgggtgttgtacccatactcgtagagcttgatggcgatgtaaatggacataaattcagtgtctccggcgagggagaaggcgatgcgacatatggcaaacttactctaaagtttatatgcactaccggtaagctaccggtgccctggccaaccctggttactactttgacgtatggcgtgcaatgctttagcaggtacccagaccacatgaaacaacacgacttcttcaaatccgccatgccagaaggttacgtgcaggagcggaccatcttcttcaaagatgacgggaattacaaaactcgtgcagaggttaaatttgaaggagataccctggtgaacaggatagaattgaagggcatagactttaaggaggatggcaacatcctcgggcacaaacttgagtacaactacaacagccataacgtgtacatcatggccgacaagcaaaagaacgggatcaaagtcaacttcaagatacgacataacattgaggacggttcggtgcaactagcggatcactatcagcagaacacacctatcggagacgggcctgtcctcttgcctgacaaccactatttgagtacacaatcagcactcagcaaagatccaaatgagaagcgtgatcatatggttctactggagtttgtcaccgctgcaggtataacactgggcatggacgaactttacaagcgatcacgagatatttcccacggatttccgccagccgtggcagctcaggatgacggaaccctgcccatgagctgcgcccaggaatctgggatggatcgtcatcccgctgcgtgtgcctcagccaggattaacgtataa

SEQ ID NO: 134 - DNA, 855 bp, Artificial Sequence
  Modified Open Reading Frame
atggtctccaagggtgaagaattatttacgggtgttgtgcccatattggtagagttggatggcgatgtgaacggtcataagttctctgtgtctggcgaaggcgagggagatgcgacgtacggaaaactcaccttgaagttcatatgcacaactggaaagctccctgtgccatggcctaccttagtcacaactctgacttatggagtccagtgctttagccgatacccggatcacatgaaacagcatgacttctttaagagtgcaatgcctgaaggctacgtacaggagcggacaatattcttcaaggatgatggaaattacaagacgagagccgaggtcaagtttgagggagatacccttgtcaacaggattgaattgaagggaatagatttcaaagaggatggcaacatcctgggtcacaaattagagtataactataacagccacaacgtgtacatcatggcggataagcagaagaacggtataaaggtaaacttcaagatccggcataacattgaggacgggtcagtccagttggccgatcattatcagcagaacactccaattggtgatgggccggtcctcctgcctgacaaccactatctcagcacccagagtgcattatcaaaggatcccaatgagaagcgcgatcacatggtcctgctcgagttcgtgaccgcggcagggatcacgcttggaatggatgaattgtacaaacgctctcgagatatttcccatgggttccctccagcggtcgctgcccaggacgacggtacgctgcctatgagttgcgcccaggagagcggaatggaccgccacccggcggcttgcgcatccgctcgtatcaatgtgtaa

SEQ ID NO: 135 - DNA, 855 bp, Artificial Sequence
  Modified Open Reading Frame
atggtctcgaaaggagaggagttgttcacaggagtagttcctatacttgtcgaactcgacggagatgtcaacggacataagttctcagtgtctggtgagggagagggagacgctacctacggcaaactgacgctgaaatttatttgtacaaccgggaagcttccggtgccatggcctactctggtcactactctgacatatggtgtacaatgcttctcacgatatcccgaccatatgaagcagcacgatttctttaagtcagcaatgccagaaggctatgtacaggaaagaaccatcttcttcaaggatgatggaaattataagactcgggcggaggtcaaattcgagggcgatacattagtgaatagaatagagctgaaaggaattgactttaaggaagacggcaatatcctcggccacaagctcgagtacaactataactcgcataacgtgtatattatggctgacaagcagaagaatggcatcaaggttaacttcaagattcgacacaatatcgaggatgggtcagtccagctggcggaccattaccagcaaaatacaccaatcggcgacggtcccgtcctgctgcctgacaaccattacctgagcactcagagcgcactgagcaaagatccgaatgaaaagagagatcatatggtcctactggagttcgttaccgcggctggcatcacattgggcatggacgagctttacaaacgcagtcgggatatttcacatggcttccctccagcggtggctgctcaagacgacggcaccttgcctatgagttgtgcccaagagtctgggatggaccgccacccagccgcatgtgcttcagcacgcatcaacgtataa

SEQ ID NO: 136 - DNA, 855 bp, Artificial Sequence
  Modified Open Reading Frame
atggtgagcaagggagaagaattgttcactggagtagttccaatacttgtcgagctagatggcgacgtcaatgggcacaagttcagtgtgtccggtgaaggcgagggagacgccacctatggcaaattgaccctcaaatttatttgcacaactgggaagctgcccgtgccctggccaacactggtgaccaccctgacatatggcgtccaatgtttcagtcgctatcctgatcatatgaaacaacacgatttctttaagagtgccatgccagaagggtacgttcaagagaggacaatcttctttaaggacgacgggaactacaagactagagccgaggtcaaattcgagggtgatactctcgtgaataggattgaattgaagggcattgactttaaagaagatggaaacatacttggccataagttagagtacaattacaattctcataacgtatacattatggccgacaaacagaagaatggcattaaggtgaactttaagatccgccataacatcgaagatggtagtgtgcagctagctgaccactaccaacaaaatactcctatcggcgatggaccagtgttgctgcctgacaaccattacctaagtactcaatctgctctgagtaaagatcccaatgaaaagcgagatcatatggtgctgctcgaatttgtaactgcagccgggatcaccctgggcatggatgaactgtacaagcgaagtcgggacatttcacacgggtttccacccgccgttgccgcccaggatgatggcacactcccaatgagttgtgcccaggagagtggcatggacaggcatcccgccgcatgtgcctctgcgcgcatcaacgtctaa

SEQ ID NO: 137 - DNA, 855 bp, Artificial Sequence
  Modified Open Reading Frame
atggtttctaaaggtgaggaattgttcaccggagttgtgcctattctcgtggagcttgatggagatgttaacggccacaagttcagtgtgagcggcgagggagagggcgatgccacgtatggtaagcttacattgaaattcatatgtacaacaggaaagcttcctgtgccctggcccacgctagtgactaccttaacgtacggagtgcagtgtttctcacgttacccagaccacatgaagcaacacgatttcttcaagagcgccatgccggagggatacgtgcaggagaggacaatcttctttaaagatgatggcaattacaagacaagggcggaagtgaagttcgagggagacacattagtcaatagaattgaactgaagggaattgacttcaaagaagatggcaatatacttggccataagttggaatataactataacagccacaacgtttacataatggctgataagcagaagaatggcatcaaggtcaatttcaagatccggcataatatagaggatggctctgtccagctcgctgaccattatcagcagaacactccgattggtgacggcccagtgttgttgcctgataatcattacctgagtacgcaaagcgctttgagcaaggatcccaatgagaaacgtgaccacatggtgctgcttgagtttgtaacagctgctggcataactttgggcatggacgagctctataagcggtcccgagatatcagccatggattcccacctgcggtggccgcccaggacgacggcactctgcctatgagctgtgctcaggaatccggtatggatcgccacccggccgcctgcgcatccgctcggattaatgtttaa

SEQ ID NO: 138 - DNA, 855 bp, Artificial Sequence
  Modified Open Reading Frame
atggtctcgaaaggcgaagagttgttcacaggagtggtcccaattcttgtcgaattggacggagacgtcaacgggcataagtttagcgtgtccggcgaaggagagggagatgctacatacggcaagctcacgctcaagttcatctgtacgacagggaaacttcccgtcccatggcctaccctagtgaccacattgacctacggagtccagtgcttctcgaggtacccggatcatatgaagcagcacgatttctttaagagtgcgatgccagagggctacgttcaggaaagaaccatcttctttaaggacgacgggaattataaaacccgggcggaggtgaaatttgaaggcgatacacttgtcaatcgcattgaacttaagggtatagactttaaggaggatggcaacatcctgggtcacaaactcgaatacaattacaattctcacaatgtgtacatcatggcggacaaacagaagaacgggataaaagttaacttcaaaatacggcacaacatagaagacggatccgttcagttggccgaccactatcagcagaatacgcctattggcgacgggccggtgctcctaccagataatcattatttatcgacccagtcggccttgtcaaaggaccctaacgaaaagagagaccacatggttctgcttgagttcgtaactgcagcgggcattacacttggtatggacgaactttataaacgctcccgggatatatcccacggctttccgcccgcagtggctgcacaggacgatgggacccttccaatgtcgtgtgcgcaggagtcaggtatggaccgccatcccgcggcatgcgcctcagcccggatcaatgtctaa

SEQ ID NO: 139 - DNA, 855 bp, Artificial Sequence
  Modified Open Reading Frame
atggtctccaaaggtgaggagctattcactggcgtcgttcccatcctggtcgaattagacggtgacgtgaatggtcacaaattctctgttagcggagagggcgagggagatgcaacgtatggtaaactgacccttaaatttatctgtacgacgggaaagcttcccgtcccttggcccaccctcgtgactaccctaacgtacggtgtccaatgtttcagccgctacccggaccatatgaagcagcatgacttctttaagtcagccatgccagaagggtacgtacaagagcgtaccatcttcttcaaggacgacggtaattataaaacgcgcgcagaagtaaaattcgagggcgatactctggtgaatagaatcgagctcaagggcatagatttcaaagaggatgggaatattctgggccataaattagaatataactacaatagtcataatgtctatattatggctgataaacaaaagaatggcatcaaagttaactttaagatccgccacaacatcgaagatggttctgtgcagttggctgaccactaccagcagaatactccaattggagacggtccagtgctgttacctgataaccattacctctctacgcaatcagcgttatcaaaggacccgaacgagaagagagaccatatggtcctcctggagtttgtaacagcagcaggaatcactctgggaatggatgaactttataagagaagcagggacatctcgcatggatttccacctgcggtcgccgctcaagatgatggaacactaccaatgtcatgtgcgcaggaatccggtatggacaggcaccctgccgcctgtgccagtgcgcggattaatgtttaa

SEQ ID NO: 140 - DNA, 855 bp, Artificial Sequence
  Modified Open Reading Frame
atggtatcgaaaggagaagaattattcacaggcgtcgtacctatcctggttgaactagacggcgacgtcaatggtcataaatttagtgtcagtggcgagggagagggtgatgcaacatacgggaaactcacactaaagtttatttgtaccacagggaaactgcccgtaccatggccaactctagtcacaacccttacatatggtgttcaatgtttctcaagataccctgatcatatgaagcagcacgacttctttaagtcagctatgccagagggctatgtacaggagcggaccatattcttcaaagatgatgggaactacaaaacgcgagccgaggtgaagtttgagggcgatacactagtaaatagaatcgagctcaagggcatcgactttaaggaagacggcaacattctcgggcataaactcgagtacaattataactcgcacaacgtgtacattatggcggacaaacaaaagaatggaatcaaggtaaactttaagattagacataatatcgaggacggatccgttcagttggccgatcactaccaacaaaatacgcccataggtgacggccctgtgctcttgcctgataatcactatctaagtactcaatccgccctttcgaaagacccaaatgaaaagcgcgaccatatggtgttgctggagttcgtaaccgctgctggtatcactttaggaatggacgaattgtacaagcggtcacgggatatttcccacgggtttccgccagcagtagctgctcaggacgacgggaccctacctatgagttgcgcccaggagagtgggatggatcgtcatcccgcggcgtgtgctagtgcacgtataaatgtctaa

SEQ ID NO: 141 - DNA, 855 bp, Artificial Sequence
  Modified Open Reading Frame
atggtttcaaagggagaggaactcttcaccggcgtggtgcccattctcgtcgaactcgacggcgatgttaatggccacaagttctccgtgagtggcgagggcgaaggcgacgcaacatacggaaaactcacactgaagttcatatgcacaacgggaaagttgcctgtgccatggccaactttggttaccactctgacctacggagtgcagtgcttctctcggtatccagatcatatgaagcaacacgacttcttcaaatcagcgatgcccgagggatacgtccaagagcggaccatcttctttaaagatgacggaaactataaaacccgagccgaggtaaagtttgaaggagatacactggtaaacagaatcgagcttaagggcatcgacttcaaagaggacggaaacatcctgggtcataagctggagtacaattacaattcccataatgtctacattatggccgacaagcaaaagaatgggatcaaagttaacttcaaaatacgacataatattgaagacggaagcgttcagctcgccgatcactatcagcagaacactcccataggcgacggtcccgtcctactgcccgataatcactatctgagcacccagtccgctttaagtaaggatccgaatgaaaagcgtgatcatatggtgttgctcgagttcgtaacggctgccggcatcactctgggaatggatgagctgtataagagatcgcgtgacatttcccacggtttcccacctgcagtggctgcacaagatgatggaacgctcccgatgagttgcgctcaggaaagcggcatggacaggcaccctgctgcatgcgcttccgccaggattaatgtttaa

SEQ ID NO: 142 - DNA, 855 bp, Artificial Sequence
  Modified Open Reading Frame
atggtttctaagggtgaggagctgtttacgggcgttgtacccatactcgtggaattagatggtgacgttaacgggcataagttctcagtgagcggagagggcgagggcgacgctacttatggcaagctgactctgaaattcatatgcacgacgggaaaactgcccgtgccgtggccgactctggttactacgctgacctacggagtgcagtgctttagtagatatccggaccacatgaagcaacacgacttctttaaatctgcaatgccagagggttatgtccaagagcgcacgatcttcttcaaagatgacgggaattataaaaccagagcggaagtcaagttcgaaggagacactctcgtcaatagaatcgagttaaaagggatcgacttcaaggaggatggaaacattctcggacacaaactggagtacaattacaacagccacaatgtctacatcatggcagataaacagaagaacggtatcaaggtgaacttcaaaataagacataacatcgaggacggtagcgtccagcttgcagaccattatcaacaaaacacgcctataggcgatgggccagtgctgctgccagacaaccactatctgtctacacagtctgcgctatctaaagatcctaacgagaaaagagatcacatggttctcttggaattcgttaccgctgccgggatcactcttggtatggatgagttgtataagcgatcgcgggacatatcacatggtttcccgcccgccgtggcggcacaggatgacggtacgctacctatgagctgcgcgcaggagtcgggtatggatagacacccggctgcttgtgcgtcagccagaatcaatgtttaa

SEQ ID NO: 143 - DNA, 855 bp, Artificial Sequence
  Modified Open Reading Frame
atggttagcaagggcgaagaactgttcaccggcgttgtacctattctagtggagctggatggagatgtgaatgggcacaagttctccgtctccggagaaggtgaaggcgacgctacgtatggaaagctgacccttaagttcatctgcactaccggaaagctgcccgttccatggcccactctcgtaaccaccctcacgtacggagttcagtgcttcagtcgctacccagaccatatgaagcaacatgatttctttaagtcagccatgccggaagggtatgtccaagagcggaccatattcttcaaagatgacggcaattacaagactagagccgaagtaaaatttgaaggtgacaccttggtgaacagaatagagttaaaaggtatcgactttaaggaagacgggaacatcctgggccacaaactggagtataactataacagccataacgtgtacatcatggccgacaaacagaagaatggcataaaggtgaactttaaaattcggcataacatcgaggatgggagcgtgcagcttgctgatcattatcagcagaacactccgataggcgacggcccagtcttgctgccagataaccactatctatcaacccagagtgccttgtcgaaagatcctaacgagaaacgagatcacatggtgctcctggagtttgttactgcggctggaattaccctgggaatggatgaactgtacaaacgctcacgagacatttcccatgggttcccaccggcagtggcagctcaggacgatgggaccctcccgatgagttgtgcccaagaatcagggatggataggcatcccgccgcctgtgcttctgcaagaataaatgtctaa

SEQ ID NO: 144 - DNA, 855 bp, Artificial Sequence
  Modified Open Reading Frame
atggtcagcaaaggagaggagctgtttaccggcgtagtaccgattctagtagaactagacggtgacgtgaatgggcataagtttagcgtgtccggagaaggagaaggcgacgccacgtacgggaagctaacattaaagttcatatgtaccacaggtaagttgcctgtgccctggcccaccttagttacaactttgacttatggagtgcagtgcttctcacgttacccagatcatatgaagcagcatgacttctttaagtccgccatgcctgagggatacgtccaggagcggaccatcttctttaaagacgacggtaattataaaactcgggccgaggtgaaatttgagggcgacacgctcgtaaaccggatcgagctcaagggtattgactttaaggaggacgggaacatcctaggccataagctagagtataattacaactcccataacgtgtacatcatggccgataagcagaagaatggtatcaaagtcaacttcaaaatccgacacaacatcgaagatgggtcagttcaactggctgaccactaccagcagaacactccgattggagatgggcctgtgttgctgccggacaatcattatcttagcacacagagtgccttgtcgaaggacccaaatgaaaagcgcgaccatatggtgctgcttgaattcgttactgctgccggaatcaccttaggtatggacgagctttataagaggagtcgggacattagtcatgggtttccacctgccgtcgctgctcaggatgacggaacactgcccatgagttgcgcccaggaatcaggaatggacaggcatcctgctgcatgtgctagcgcacgaataaatgtataa

SEQ ID NO: 145 - DNA, 855 bp, Artificial Sequence
  Modified Open Reading Frame
atggtatccaagggcgaggaactgtttaccggagtggttcccatcctcgtcgagctggacggcgacgtcaacgggcacaagtttagcgtctcaggcgaaggcgaaggcgatgccacttacggcaagctgactcttaagtttatatgcacaacaggaaaactgccggtgccatggcccaccctagttaccactctgacttatggcgtacagtgcttcagtcggtatcccgaccacatgaagcaacacgatttcttcaaatctgcaatgcccgagggctacgtgcaggaacggaccatcttcttcaaagatgacggcaattacaaaactcgggcggaggtgaagttcgaaggtgataccctggtgaatcggatcgaactaaagggaattgatttcaaagaggatggcaacattcttggccacaaattggagtataattacaattctcacaacgtgtacataatggcggataagcagaagaacggaataaaagtcaacttcaaaattcgtcataatattgaagatggctctgtacagttggccgaccactatcagcagaacacgcctataggcgatggacccgtactgctgcctgacaaccactatcttagcacacagtctgcactgtccaaggaccctaatgagaaaagggaccacatggtccttctcgaatttgttacggccgccggaattacgttgggcatggatgaactatataaacggtcaagggatatatctcacggctttccgcctgctgtggcagcgcaggacgacgggacacttcctatgtcttgtgcacaagaatcagggatggaccggcaccctgcagcttgtgcttcggcccgtataaacgtataa

SEQ ID NO: 146 - DNA, 855 bp, Artificial Sequence
  Modified Open Reading Frame
atggtatcaaaaggagaagagctgttcacgggcgttgtacccattctcgtagagctcgacggtgatgttaatggacataagttctccgttagtggtgagggcgagggtgacgcaacttacggaaaattgacgctgaaattcatctgcacgacagggaaactccctgtgccctggcccacactggtgaccaccttaacatacggtgtgcagtgcttctcaagataccctgaccacatgaaacagcatgatttcttcaagtccgccatgcctgaaggttacgtccaggaacgtacgatcttcttcaaggacgatggtaattataaaactcgggcggaggtgaagttcgagggagacaccctagtaaacagaattgagcttaagggcatagactttaaggaagatggtaacatccttgggcacaagcttgagtataactacaacagtcataacgtgtacataatggctgacaaacagaagaacggtataaaagtgaactttaaaatcaggcacaacatcgaggatgggtctgtacaactagcagaccactaccagcagaatacacctatcggcgatggtccggttcttctgcctgataatcactatctatccacacagtcagcactctctaaagaccctaatgaaaagcgggatcatatggtattactcgagtttgtgacagcagcaggaatcactctcggcatggatgagctgtataagcgatccagggatatttcacacgggttcccgccagccgtggccgcacaagacgatggcacgcttcccatgagttgcgcccaggaatcaggtatggaccggcacccggccgcttgtgccagtgcccgaataaacgtgtaa

SEQ ID NO: 147 - DNA, 855 bp, Artificial Sequence
  Modified Open Reading Frame
atggtgtccaaaggcgaagaactgttcactggtgttgtgcccatattggtagagctggatggagatgtcaatggacacaagttcagcgtctccggagagggcgaaggtgacgcgacttatggaaagctaaccctaaaattcatctgtactaccggcaagttaccggtgccttggccgacgcttgtgacaacattgacctacggagtccaatgtttcagtcggtatcccgaccacatgaaacaacatgacttcttcaagtccgctatgccggagggctatgtccaagagcgaacgatcttctttaaagacgatgggaactacaaaactcgggcagaagtcaaattcgagggcgacacgttggttaatcggatagagctgaaaggaatcgatttcaaggaagatggaaatatcttaggccataaactggagtataattataactcccacaacgtttatataatggctgataaacagaagaacggaataaaagtgaatttcaagatccgacacaatattgaagatggttccgtacagctagctgatcattaccagcaaaatacgcctatcggagacggcccggtgcttctccctgacaaccattatttgtcgacccagtccgcgcttagtaaggatccaaacgagaagcgagatcatatggtactcctcgaatttgtgacagcagcgggcataacattagggatggacgagctctataagcggtcccgtgatatcagtcatgggttccctccagctgtagctgctcaggatgacggtactttgcccatgtcatgcgctcaagaatcgggcatggataggcacccagctgcctgcgcttccgctaggatcaatgtgtaa

SEQ ID NO: 148 - DNA, 855 bp, Artificial Sequence
  Modified Open Reading Frame
atggtttcgaagggcgaggagctgttcacgggtgtggtgccaatcctggtagaactggacggagacgttaatggccataagttcagcgttagtggagagggtgagggcgacgccacgtatggaaaattgacacttaaattcatatgtaccactggaaagctccctgtgccatggcccactctggttacaactcttacatatggcgtacagtgcttctctaggtatccggaccatatgaagcagcacgatttctttaaatccgctatgccagaaggatacgttcaagagcgcaccatcttctttaaagacgacggaaattacaagactagagctgaagtcaaattcgaaggcgacacactggttaatcgcatagaattgaagggtatagactttaaggaagacggaaatatcctaggccacaagcttgagtacaactacaactcccataatgtatatattatggccgacaagcaaaagaatgggatcaaggttaatttcaaaatccgccacaatatcgaagatggcagtgtccaacttgcagaccactatcaacaaaacacaccaattggtgacggtccagtactgttaccggataatcattatctctccacacaatccgccctgtccaaagaccctaacgagaagcgcgaccatatggtattgttagaatttgtgacagctgccggcattactctgggcatggatgagctttataaacggtcaagggatatttcccacggatttcctcctgctgttgcagcgcaggacgacggcactttgccaatgagttgtgcccaggagagcggcatggaccggcaccctgctgcctgcgcaagtgcccgcatcaacgtgtaa

SEQ ID NO: 149 - DNA, 855 bp, Artificial Sequence
  Modified Open Reading Frame
atggtgagtaagggcgaggagttatttaccggcgtggtgcccatattagtagagctggatggcgatgtaaatggccataagttcagtgtctcaggagagggcgagggcgacgctacctatggaaaactgaccctaaagttcatctgcactacaggcaagctgccggtgccatggcctacacttgttacgactttaacttatggtgtacagtgtttctcccgatatccggaccacatgaagcagcatgacttctttaagtcagcaatgccagagggttacgttcaagaacgcacgatattctttaaggatgatggcaactataaaacccgcgcggaggttaagtttgaaggagacacactcgtcaatagaatagaattaaaaggcatagacttcaaggaggacggaaatatattgggacacaagctcgaatacaattataattcacacaatgtgtatatcatggcggataagcagaagaatggtataaaggtcaacttcaagattcggcacaatatcgaagacggatctgtgcagctggcagaccattatcaacagaacacaccgattggagatgggcccgtcctgctgcccgataatcactacttgagtacccaaagtgccttgtcgaaggaccctaatgaaaagcgcgatcacatggtactgctagaatttgtgacagctgcgggaattactctcgggatggacgagttgtataaacgctctagggacatctcacacggtttccctccagcggttgctgctcaagacgacgggaccctcccaatgtcctgcgcgcaggaatcaggtatggatcgccatccagctgcatgtgctagcgcaagaataaatgtctaa

SEQ ID NO: 150 - DNA, 855 bp, Artificial Sequence
  Modified Open Reading Frame
atggtaagtaagggagaagaactcttcaccggtgtggtgcccatactcgtagaattggacggcgatgtgaacggccataaattctccgtgagtggagagggcgagggtgatgccacttatggcaaattaacacttaaatttatttgcacaacgggcaagttgccagtgccatggccgacattggtcaccacgctgacatatggcgtgcagtgcttctcgcgatacccagatcacatgaaacaacacgatttctttaagagcgccatgccggaaggatacgtacaggagaggaccatattcttcaaggacgacgggaactacaaaacccgggcagaggtaaaatttgaaggagacacactagtgaaccgcatcgaactgaaaggaatcgactttaaggaggacggcaatatcctcgggcacaagctcgagtataattacaacagtcacaacgtttatattatggccgacaaacaaaagaatggaatcaaagtaaacttcaagattcgacacaacatagaggacggcagtgtacaattggccgaccattaccagcagaacacaccaataggcgacgggcccgtcctccttccggacaatcactacttgtctacgcagagcgcacttagcaaggatccaaatgaaaagagagaccatatggtcttactggagttcgtaacggccgctgggataacccttggtatggacgagctatataaacgaagccgggacatctctcatggatttcctcccgccgtagccgcacaggatgacggaacattacctatgtcttgtgcacaggaaagcgggatggaccggcaccctgcagcctgcgcctcagcccgcatcaatgtctaa

SEQ ID NO: 151 - DNA, 855 bp, Artificial Sequence
  Modified Open Reading Frame
atggtatcaaaaggagaagagctgtttacaggcgtggtccctatattagttgagctggacggcgatgtgaacgggcataaatttagtgtgtccggtgaaggtgaaggcgatgccacctacggtaaactgactctgaaatttatatgtaccaccgggaaattacccgtgccatggcctacactagtcactactttgacatacggcgtacagtgtttcagcagatatcccgaccatatgaaacagcacgatttcttcaagagcgcaatgcctgaaggctatgtacaagagcgaacaatcttcttcaaagatgatgggaactacaaaactagagcagaagtcaaatttgagggcgacactcttgttaatcgaatcgagttaaagggcatcgacttcaaagaagacggcaatatcctgggccacaagctcgaatataactacaatagtcacaacgtgtatatcatggcggataaacagaagaatggcataaaagtcaacttcaagatacgccataacattgaagacggctctgttcaattagccgatcattatcaacagaacacgcctattggtgacggacctgtcctgctccctgataatcactacctgagtactcagtctgcactgtctaaagatccgaatgagaagcgtgatcacatggttcttcttgagttcgtgaccgcagccggtattacacttggcatggacgaactgtataaacgtagtagagatatcagccatggctttccaccggccgtagctgcgcaggacgacggtaccctgccgatgtcttgcgcacaagagtctgggatggatcgccaccctgccgcctgcgccagtgctcggatcaacgtctaa

SEQ ID NO: 152 - DNA, 855 bp, Artificial Sequence
  Modified Open Reading Frame
atggtgagcaagggagaggagctgtttacaggagttgtgccaatactggtagagctggacggcgacgtaaacggtcataagttctcagtatcgggagaaggtgagggcgacgcaacatacgggaagttgacactcaaattcatttgtacaactgggaaactcccagtcccttggcccactctcgtgacaacgttaacgtacggcgtccagtgtttctcaaggtacccagatcatatgaaacagcacgatttctttaaatccgcaatgcctgaaggatatgtccaagaacgtacaatcttcttcaaagacgacggtaattacaaaaccagggctgaagtaaaattcgagggcgatacgcttgttaatcggatagaacttaaaggaatcgactttaaagaggatggaaatattctgggacacaaactcgagtacaattacaattcacacaatgtgtatattatggccgacaaacagaagaatggcatcaaggtgaactttaagatccggcacaatattgaggacggaagcgtgcagctcgcggatcactatcaacagaatacgcctataggtgatggcccagttctgctgccggacaatcactatcttagcactcaaagcgcactgtcgaaagatccgaatgaaaagcgagatcacatggtgttactggagtttgtgacggcggcagggattacactcggaatggacgagttatataaaaggtcccgagacatcagtcatgggtttccaccagctgttgccgcacaggacgacgggactctgccaatgagctgtgctcaggagtcaggcatggaccgacacccagcggcttgcgcttcagcacggatcaatgtctaa

SEQ ID NO: 153 - DNA, 855 bp, Artificial Sequence
  Modified Open Reading Frame
atggtgtcgaaaggagaagaactatttacaggtgtagtcccgattcttgttgaactggacggcgatgtgaatggacataagttctcagtgagcggcgagggtgagggtgacgccacttacggcaagcttaccctgaagttcatatgcactacagggaagttgccagtaccttggccaaccctagtcacaactctcacttacggcgtgcaatgtttcagccggtacccggaccacatgaagcagcacgacttctttaaaagcgcgatgccagagggatacgtgcaagagcgtacaatattcttcaaagatgacggaaattacaaaacccgggcagaagtgaaatttgaaggtgacacactcgtgaaccggatcgagcttaagggaattgatttcaaggaggacgggaacatcttaggccataagctagagtataattacaattcacacaacgtctacattatggctgacaagcaaaagaacggtattaaggttaactttaaaatacggcataatatcgaagatgggtccgtacagctcgctgaccactaccagcagaatactccaattggtgacggccctgtgctactcccagacaatcattacctaagcacacagtcagcgctatccaaagatccgaatgaaaagcgagaccatatggtgcttctcgagtttgttacggccgccggaataacgctgggcatggacgagctttataagcgatctcgagacattagccacgggttcccacccgcagttgctgcccaggacgacggaaccttgccaatgagctgtgcgcaagagtctggaatggacagacatccagcagcctgtgcttccgcccgaatcaatgtttaa

SEQ ID NO: 154 - DNA, 855 bp, Artificial Sequence
  Modified Open Reading Frame
atggtttcgaagggagaagaactgttcacaggtgtagttccaatactcgttgaattggacggtgatgttaatggtcataagttcagcgtgtcgggcgagggtgaaggagatgcaacgtatggaaaattaacccttaagttcatctgtactacagggaagcttccagtaccttggcccaccctggtcaccacactcacctacggcgtgcaatgtttctctcggtacccggaccacatgaaacagcacgacttcttcaaatcggcaatgcctgaaggatacgtccaagaaaggactatattcttcaaagatgacggaaactacaaaaccagggcagaggtgaagtttgaaggagacaccctggtaaacaggatcgaactcaaaggaatcgacttcaaagaagacggcaacatcttgggacataagttagaatacaactataattcccacaacgtctatatcatggcagataaacagaagaacggaatcaaagtcaatttcaagattcgtcacaacatcgaggatggttctgtccagctcgctgaccattaccagcagaacacgcccattggcgacggaccagtgctgctcccagataaccactacctgtctacccagtccgcgttaagtaaagaccctaacgagaaacgtgatcacatggtgctgctggagttcgttaccgccgctggcattacattagggatggatgagctgtacaagaggagccgtgatatatctcatgggtttcctccagctgttgccgcccaagacgatggtacattgccaatgagttgtgcccaagagagtgggatggacagacacccagcagcatgcgcttctgcgaggattaatgtttaa

SEQ ID NO: 155 - DNA, 855 bp, Artificial Sequence
  Modified Open Reading Frame
atggtgtcgaaaggagaggagctcttcactggagtggttcctatcctggtggagcttgacggagacgtaaacggacacaaattctccgtatcaggcgaaggagagggtgatgccacgtatggcaaattgacactaaagtttatttgtacgacagggaaacttcccgttccgtggcccacactggtaaccactcttacctatggagttcaatgctttagtcgttatccagatcatatgaaacagcatgatttctttaaatctgcgatgcctgaaggttacgtacaggagaggacaatattctttaaagacgatgggaactataagacgcgggcagaggtgaagtttgagggcgacacccttgtgaaccgaatcgagctgaaagggattgatttcaaggaggatggtaacatccttgggcataaactagaatataactataatagccacaatgtatatatcatggctgacaaacagaagaacggcattaaggtgaatttcaagattcgacacaacattgaagatggctctgtccagctggccgaccactatcaacaaaacacaccgattggtgatgggcctgtattgctccctgataatcactacctctcaacgcagtcagctcttagcaaggatcccaatgagaaacgcgatcacatggtcctactggaatttgtcaccgcggctgggatcactcttgggatggatgagttgtataagcggtctagagatatctcgcacgggtttcctcctgcagtggcagcacaagacgatggcacactgcccatgtcctgcgctcaggaatccggtatggaccggcacccggccgcctgcgcctcagctcggatcaacgtgtaa

SEQ ID NO: 156 - DNA, 855 bp, Artificial Sequence
  Modified Open Reading Frame
atggtgtcgaagggagaagagttgtttaccggagttgtacccattctggtggaacttgatggtgatgtcaacggccataaatttagcgtgtctggcgaaggcgaaggcgacgcgacttatggaaaattgacccttaaattcatttgcactacgggcaagctgccagtgccatggcctaccttggtgactacccttacatatggcgtacaatgcttctcgcgataccctgatcacatgaaacaacatgacttcttcaagagtgctatgcccgaaggatacgtgcaagagaggacaatattcttcaaagacgacggaaattacaaaacaagggctgaagttaaattcgaaggagacaccctggtgaaccgaattgaattaaagggcatcgacttcaaagaagatggcaacattcttggacacaaactcgaatataattacaactcgcataacgtttacatcatggctgataagcagaagaacggtatcaaagttaactttaagatccgccacaacatagaagacgggagcgtacagctagcggatcattatcagcagaatacgcctatcggcgacgggcccgtactcctgccggacaatcactacctatccacccagtccgccctgtccaaagaccctaacgagaagagagatcatatggtcctgctcgaattcgtaacggctgccggcattaccctcggtatggacgaattatataagagatctcgggacatcagccacggatttccgccggcagtggctgctcaagacgacggaacactgcctatgtcctgtgctcaagagagtgggatggacaggcacccggccgcgtgtgcctcggcaaggatcaacgtttaa

SEQ ID NO: 157 - DNA, 855 bp, Artificial Sequence
  Modified Open Reading Frame
atggtgtccaagggagaggagctgtttactggcgtagtgccgatactggtggagctcgacggtgatgtgaatgggcataagttcagtgtttctggagaaggcgagggcgacgccacctatggaaaactgaccttaaagttcatttgcacaactggtaagctcccagttccatggcctacgctggtaaccacactgacgtacggcgtgcagtgcttctcccggtatccagatcatatgaaacagcatgacttctttaagtcagccatgccagaagggtatgtgcaggagcgtaccatcttctttaaggatgatgggaattacaaaaccagagctgaggtgaagttcgaaggcgacaccctggtgaatcggatcgagttgaagggaattgatttcaaagaggacgggaatatacttgggcacaagctcgagtataactacaatagccataatgtgtacatcatggcggacaagcagaagaacggtatcaaagtgaactttaagatacgccataacatcgaggatggctccgttcagcttgccgaccactatcaacaaaacacacctattggcgatggtcccgttctcttgcctgataatcattatctttcaactcagtctgcgctttcgaaagaccctaatgagaagcgggaccatatggtccttctggaatttgtaaccgctgccggcattaccctcggcatggacgagctttacaagcggagcagggacatatcgcatgggtttcctccggccgttgctgcccaagatgacggcacactcccgatgtcctgcgcacaggaaagcggcatggatagacatcctgccgcctgtgcttccgcccggatcaacgtgtaa

SEQ ID NO: 158 - DNA, 855 bp, Artificial Sequence
  Modified Open Reading Frame
atggtgtccaagggagaggaactgttcacgggcgtggttccgatcctggtggaattggacggcgatgtcaacggacataagttctccgtgagcggagaaggagaaggtgacgccacctacggaaaattgaccctaaagtttatctgcacgactggaaaactcccagttccgtggcccaccctggtgaccaccttaacttatggcgtgcagtgctttagtcggtatcccgaccacatgaaacagcacgatttctttaaatcggccatgcccgagggctatgttcaagaacgtaccatcttctttaaagacgacggcaactataagactagggccgaggtgaagttcgaaggcgatacgcttgtgaacaggattgaactcaagggtatcgactttaaagaggatggaaacattcttggacataaactcgagtacaactataactcgcacaacgtgtatattatggcggataaacagaagaacggcattaaagtgaacttcaaaatccgtcataatattgaggatgggtctgtgcagcttgctgatcactatcagcagaacactcctataggagacggacccgtccttcttccagacaatcactatctgagcactcagagtgcattgtctaaggatcccaatgaaaagagggaccatatggttctgctcgagtttgtgacagcagctggcatcaccctcggcatggatgagctgtataaaaggagtcgggacatctcgcacggtttccctcctgctgtagccgcacaagacgatgggactcttcccatgtcgtgcgcgcaggagtcgggaatggaccggcacccagctgcttgtgccagtgcgagaatcaacgtgtaa

SEQ ID NO: 159 - DNA, 855 bp, Artificial Sequence
  Modified Open Reading Frame
atggtgtctaagggagaggaattattcaccggtgtggttccaattctggtagagttggacggagatgttaatggacacaagtttagtgtgtcgggagaaggagaaggcgatgctacttacggcaagcttacactgaaatttatctgtaccactgggaagcttcccgtgccgtggccgactctggttaccacgttaacgtatggcgtgcagtgtttcagccgttatcccgatcatatgaaacagcacgacttcttcaagtcggctatgcctgaaggatatgtccaagagaggaccatattcttcaaggatgacgggaactataaaacacgagctgaagtgaaatttgaaggcgatactcttgtcaaccgcatcgagttgaaagggatcgacttcaaagaagacggcaacatccttgggcacaaactggaatacaattacaattcgcataatgtttacattatggccgataagcagaagaacgggatcaaagttaactttaagatccgacacaatatcgaggacggcagcgttcagttggcagatcactaccaacagaacacgccgatcggcgacgggcctgtgctgcttcctgataatcattatctctctactcaatcggcattgtcaaaagatccaaatgagaaacgggaccatatggttctccttgaatttgttactgctgcaggaataactttgggcatggatgagctgtataaacggtctcgggacatctcacacggattcccacccgcagttgctgcccaggatgatggaacactgcccatgtcatgcgcacaggagtcgggaatggatcgccatcccgctgcttgtgcatccgctaggattaacgtgtaa

SEQ ID NO: 160 - DNA, 855 bp, Artificial Sequence
  Modified Open Reading Frame
atggtgagcaaaggtgaagaattattcactggagtggtgccaatactagtagaactggacggtgacgtgaacggtcacaagttcagtgtctctggtgagggcgagggtgacgctacctatggcaagcttaccttgaagttcatttgcacgacaggtaagctgcccgtgccctggcccacattggttaccactctcacctatggtgtgcaatgtttcagcaggtatccagatcatatgaagcagcatgacttctttaagtctgctatgcccgaagggtatgttcaggagcggactatcttctttaaagatgatggtaactacaaaacacgcgccgaggtgaaattcgaaggcgacacgctcgttaatagaatcgagctgaaaggaatagactttaaagaggatggtaacattctgggacataagttagagtataattataatagccataatgtgtacattatggctgacaagcagaagaacggtatcaaggtgaatttcaaaattcgccacaatatcgaggacggcagtgtgcaactggccgaccattaccagcagaatacacctataggtgatggtccagtcctcctgcctgataatcactacttaagtacccagagtgctttaagcaaggacccgaacgagaagcgagaccatatggtcttacttgagttcgtaaccgctgccggaattaccctgggcatggatgagctttataagcgcagcagagatatcagccacggctttccgccggcggtggcagcccaggatgacggtactcttccgatgtcctgcgcgcaggagagcggaatggaccgccacccggctgcttgcgcttccgcgaggatcaacgtgtaa

SEQ ID NO: 161 - DNA, 855 bp, Artificial Sequence
  Modified Open Reading Frame
atggtcagcaagggagaagaattattcaccggagtggtacccattctggtggagctcgacggcgatgtgaatggtcataagttcagcgtctccggcgaaggcgaaggagacgcaacttatggcaaactcacactgaagttcatttgtactacaggaaagttgccagtcccttggcccactctggtgacaacgctgacctatggcgtccagtgtttctccagatatccggatcatatgaagcagcacgacttcttcaaaagtgctatgcccgagggctatgtccaggaacgtactatcttctttaaagatgatggtaactataagactagggccgaggtcaagtttgaaggcgataccttagtcaatcgaattgaactgaagggaatcgacttcaaagaggacggcaacattctgggccataagctggagtacaattataacagccataatgtatacattatggctgataagcagaagaatggcatcaaagtgaacttcaagatccgccacaatattgaggacgggtccgtccaactggcggatcactatcagcagaacacacctataggtgacggtcccgttctgctgccagacaatcactacctcagtacccagtctgccctgtccaaagacccaaatgaaaagcgagaccatatggtcctgctggagtttgtgacggcagctgggattacgctgggcatggatgagttgtataagaggagccgtgatattagtcatggcttccctcccgcagtggccgctcaggacgatggaacccttccaatgtcctgtgcccaggaaagcgggatggacaggcatcccgctgcctgcgcatccgcacgtattaacgtgtaa

SEQ ID NO: 162 - DNA, 855 bp, Artificial Sequence
  Modified Open Reading Frame
atggtgtctaaaggcgaagagttgttcaccggtgtggtgccaatcttggtagagcttgatggcgacgtgaacggccacaagttctctgtatcaggagagggcgaaggtgatgcgacgtacggaaaactcactttgaagtttatctgtacgaccggcaaattgcctgtgccctggccaacactggtgacgactctcacttacggcgtgcaatgcttcagtcggtaccctgatcatatgaagcaacatgatttcttcaagtccgctatgccagaaggatatgtgcaggagcggacaatcttcttcaaagacgatgggaattataaaacccgagcggaggtcaagttcgagggtgacacactcgtgaacaggatcgaactaaagggcattgactttaaggaggatgggaatatcttgggtcataagttggagtataattataactctcacaacgtatatattatggctgataagcaaaagaatgggatcaaggtcaacttcaaaatcagacataatatcgaggacggttccgtccagttggctgaccattatcagcaaaacacaccaattggcgacggtcctgtccttctcccagataatcactatctctctacccagtcagccctcagtaaggatccgaacgaaaagagggaccatatggtccttctggagttcgtgaccgccgccgggattacgttgggcatggatgagctctataagcgatcgcgggatatctctcatggatttccgccagctgtagcagctcaagacgatgggacccttcccatgtcttgcgcgcaagagtcgggcatggaccgccatcccgctgcttgcgcgtctgcccgcatcaacgtataa

SEQ ID NO: 163 - DNA, 855 bp, Artificial Sequence
  Modified Open Reading Frame
atggtgagtaagggagaggagctcttcaccggcgtggtgcccatcctcgtggaactggacggtgacgtcaatggtcacaagtttagtgtgagtggcgagggtgagggtgatgccacctatggcaagctgacattgaaatttatctgcacgactgggaaactcccggtgccgtggcccacactcgtcactacattgacgtacggagtccagtgctttagtaggtacccggatcatatgaagcaacatgacttcttcaagtccgccatgcccgagggctatgttcaggagcgcaccatcttcttcaaggacgacggcaactacaaaacaagggccgaggtgaaatttgaaggcgatactttagtcaacaggatcgaattaaagggtatcgacttcaaagaagatggtaacattcttggacataagctggaatacaattataattcccacaacgtgtacattatggcggacaaacagaagaatggcataaaggtcaacttcaagatccggcacaacatcgaggatgggtccgtgcagctggcggaccattaccaacaaaacactcctattggtgatggtcccgtgttgctgccagataaccattatctcagcacacagagcgctttgtcgaaggatcctaacgagaaaagggaccatatggttctgctcgagttcgttacggccgcagggatcaccctcggcatggacgaactctataagagatcacgcgatatctctcatgggtttcctcctgcggttgctgcccaggatgacggaaccctgcccatgtcttgcgctcaagagagcggcatggacaggcacccagctgcgtgcgcgtctgcccgaatcaatgtctaa

SEQ ID NO: 164 - DNA, 855 bp, Artificial Sequence
  Modified Open Reading Frame
atggtgtcaaagggcgaagagctctttaccggcgtggtgccaatcctcgtggagctcgacggagatgtgaacggacacaaattctccgtgtcaggcgagggagagggtgacgccacgtatgggaagttaactctcaagtttatttgtactactggcaagttgcccgtaccctggccgacattggtgacaacattgacgtatggcgttcaatgtttcagccgataccctgaccatatgaaacagcatgacttcttcaagtctgccatgcctgagggatatgtacaggaacgcacaatattcttcaaggacgatggcaactataagactcgagccgaagtcaagttcgaaggcgatacactcgtgaatcgcattgaactcaaagggatcgacttcaaagaggatggcaacattctgggccacaagctggagtataattacaactcacacaacgtctatattatggcggataagcagaagaacggcattaaagtgaacttcaaaatccgtcataatatcgaagacgggagcgtgcaactggctgatcattaccaacagaatactccaattggagacggacctgtgctactacccgacaatcactatctgtccactcagtctgcactgagtaaggaccctaatgagaagcgggatcacatggttcttctggaattcgttacagctgcaggcatcacgctcggaatggatgagttgtataagaggagccgggatatatcccacgggttccctccagctgtggctgcacaggacgatggcacactgccaatgtcttgtgcgcaggaaagtgggatggatcggcatcccgcggcgtgcgcatcagcaaggattaatgtctaa

SEQ ID NO: 165 - DNA, 855 bp, Artificial Sequence
  Modified Open Reading Frame
atggtcagtaagggagaagaactgttcaccggcgtggttcctattcttgtcgagcttgatggagacgttaatggtcacaagtttagtgtaagtggcgagggagagggagacgccacatacggaaaattgactcttaagttcatctgtactacgggtaagttgcccgtgccgtggcccacgttagtcactacgttgacctacggtgttcagtgcttcagccgctatcctgatcatatgaaacaacatgatttcttcaagtctgccatgccggaaggctacgtccaggaacgaacaatattcttcaaggacgatggcaactacaagacgcgggctgaagtgaaattcgagggcgacacactcgtgaacagaattgagcttaaagggatcgatttcaaggaggacgggaatattctcggccacaaacttgagtataactacaatagccataacgtctacattatggccgacaagcaaaagaacggcattaaggtaaactttaagataagacataatatcgaagatggttctgtgcagctcgccgatcattatcaacagaatacgcccatcggagatgggcctgttctgctgcccgacaatcactatttgtccacccagtcagcgctctctaaagacccgaatgagaagcgagaccacatggtcctactggagttcgtaactgccgccggcattacgctgggcatggacgagctgtacaaacgatctcgagatattagtcacggctttccacctgccgtcgccgcgcaggacgatggcacattgccaatgagttgcgcacaagagtcaggaatggaccgccatcccgccgcttgtgccagtgctcggatcaacgtgtaa

SEQ ID NO: 166 - DNA, 855 bp, Artificial Sequence
  Modified Open Reading Frame
atggtctccaagggagaggaattgtttactggtgtggtgccaattctcgtcgagctcgacggagacgtcaacggacataagttctcggtgtccggtgagggcgaaggcgacgctacctacggtaagttgactctaaagttcatatgtaccacgggtaagttgcctgtgccctggcccacgctagttacaactctgacatacggtgtccaatgcttcagccgatatccagatcatatgaagcagcacgatttcttcaaatcagcgatgcctgagggctacgtccaggagaggacgatcttcttcaaagacgacggcaactacaagacacgtgccgaagtaaaatttgaaggagatacgctggtgaatagaatcgagctcaaagggatcgactttaaagaggatggcaatatattgggccataaacttgaatacaattataacagtcataatgtgtacataatggctgataagcagaagaatggtatcaaggtaaacttcaaaattcgacataatattgaagatgggtcagttcagctggcagatcactaccagcagaacacacccatcggtgatggcccagtactactgccagataaccattatctgtcgacacagtcagccctctctaaggatcccaacgagaagagagaccatatggtgcttctggaatttgtgaccgccgcgggcataacattaggcatggacgagctatacaagcggagccgggacatttctcatggctttccgcctgctgtagcggcgcaagatgatggtaccctaccaatgtcttgcgcgcaagagagcggcatggatagacatcctgcggcttgtgcctcggcgaggatcaacgtataa

SEQ ID NO: 167 - DNA, 855 bp, Artificial Sequence
  Modified Open Reading Frame
atggtaagcaaaggcgaagaactgtttacgggagtagtacccatcctggtggaacttgatggagacgtaaatgggcataagttctctgttagcggcgaaggcgaaggtgacgccacatatgggaaactgacacttaaatttatatgcacgaccggtaagctcccagtaccctggccaactctggtaactacactaacctatggagtgcaatgctttagtaggtatcccgatcacatgaaacaacacgacttcttcaaaagcgcgatgccggaaggatacgtacaagaacgcacaatattctttaaggatgacggaaattacaagacacgtgcagaggtgaaattcgaaggagatacactggtgaaccgtatagagctcaaagggatagactttaaggaagacggaaacatactcggacataaactagaatacaattacaactcccacaacgtatacataatggctgacaaacaaaagaatggaataaaagtgaactttaaaatacgacataatattgaagatggctcagttcaacttgcagatcactaccagcaaaatacaccaatcggagacgggcctgtactattgcccgataaccactatctcagcacacaatcagcactatctaaagacccaaacgagaagcgagaccacatggtcctcctggagttcgtgacagccgccggaataacactaggaatggatgaactgtacaaacgaagcagagacatatcacatggctttccaccagcggtcgccgcacaagacgatggtaccctaccaatgagttgcgcccaagagtcaggaatggataggcatcccgctgcatgcgcttcggcccgcataaatgtctaa

SEQ ID NO: 168 - DNA, 855 bp, Artificial Sequence
  Modified Open Reading Frame
atggtttcaaagggagaggaactctttaccggcgtagtaccgatactggttgagctagacggcgatgtcaacggtcacaagttctctgtgagcggcgaaggagaaggagatgccacatacggaaagttgactctaaaatttatttgcacaacgggcaaactgccagtgccttggccaacacttgtaacaacactcacttacggcgtacaatgtttctcaagatatcccgaccacatgaagcagcatgacttctttaaaagcgctatgcctgaaggctatgtacaagaacgcactatattctttaaggatgacggcaattacaagactagagcagaagtgaaattcgagggagataccctagtaaaccggattgaattaaaagggatcgatttcaaggaagatggaaatatcctgggccataagctggaatacaactataactcacacaatgtttatatcatggcagacaagcaaaagaatggaattaaagtgaacttcaaaatacggcataatatagaggacggaagcgtacagttagccgaccattatcaacaaaatactccaataggcgatgggcccgttctactgcccgacaatcattatctcagcacgcaatcagcactgtcgaaagatccaaacgagaaaagggaccacatggtattgttagaatttgttactgccgccggaatcacattaggcatggacgagctctataagaggagccgtgatatctcccatggctttccgccagccgtagccgcccaagacgatggaacacttccgatgtcctgtgcacaagagagtggaatggatcgacacccagcagcctgtgcaagcgcccgaataaacgtgtaa

SEQ ID NO: 169 - DNA, 855 bp, Artificial Sequence
  Modified Open Reading Frame
atggtttcaaaaggcgaagaattattcactggtgttgtaccaatccttgtagaactagatggcgatgtcaatggtcacaaatttagcgtaagtggagaaggagaaggagacgcaacttatggaaaactgacactaaaatttatatgcacaaccgggaagctgccagttccatggccgacgctagtaacaaccctaacatatggagtacaatgctttagccgatatcctgatcacatgaagcagcacgatttcttcaaatcggctatgccagaaggttacgtgcaagaacgcaccatattctttaaagatgacggcaattacaaaaccagagccgaggttaaattcgagggagatacattagtgaaccggattgaattaaagggcatcgacttcaaggaagatggaaatatcctaggacacaaattggagtataattacaatagccacaacgtctacataatggccgataaacagaagaacggtataaaagttaactttaaaataagacataacatcgaagatggctcagtacagctggccgaccactatcaacagaatacacctattggagatggacctgtattgttacccgataaccactacctgagtacccaaagcgccttaagtaaggatccaaacgaaaagagagatcacatggtcttgttagaatttgtcactgccgcgggcatcacactgggaatggatgaattgtataaacggagtagagacatctcccatggctttccgccagccgtagccgcccaagacgacgggaccctacctatgagttgcgcgcaggagtctggaatggatcgtcaccctgcggcctgcgcgagcgcccggatcaatgtttaa

SEQ ID NO: 170 - DNA, 855 bp, Artificial Sequence
  Modified Open Reading Frame
atggtcagtaaaggagaagaattatttacaggcgtcgttccaatattagtggagttggacggtgacgtcaacggtcataaattctctgtgtcaggtgaaggagaaggagatgcaacctacggaaagctgactttgaaatttatttgcaccactggtaaattacctgtaccgtggccaaccctcgtgacaaccttaacttacggtgtacaatgctttagccgctatcccgatcatatgaaacagcacgacttctttaaatccgcgatgcccgaaggctacgtacaagagcgcacaatattctttaaggacgacggcaactataagacccgagccgaagtgaaattcgaaggcgacaccctggtaaaccgaatcgagctgaaaggcatagacttcaaggaggatgggaatatactcggacataagttagaatacaattacaatagtcataacgtgtacataatggctgataagcagaagaacggtataaaagtgaactttaagataagacataatatagaagacgggagtgtccaattagccgaccactatcaacaaaatacgccaatcggagacggcccagtattactgcccgataatcactacctcagtacacaaagcgcactctcaaaagacccgaatgagaagcgggatcacatggtacttctggaatttgttaccgcagccgggatcacactcgggatggatgaactatacaaacgaagccgggatatcagtcacggatttccgcctgcagtcgctgcccaagatgatggcactctgcccatgagctgcgcccaggagagcggtatggaccggcaccctgcagcctgcgcaagcgcccgcataaatgtttaa

SEQ ID NO: 171 - DNA, 855 bp, Artificial Sequence
  Modified Open Reading Frame
atggtctctaaaggtgaagagctgtttactggtgttgttcccatcttggtcgaactagacggtgatgttaacggccacaagttctccgtgtccggcgaaggcgaaggagacgccacgtatggcaaactcacactgaaatttatctgcacaaccgggaaactgcccgtgccttggccaaccctcgttacaacccttacatacggcgttcaatgcttctcacgctacccagaccacatgaaacaacacgatttctttaaaagcgcaatgccggaaggatatgtccaagaaaggacgatcttcttcaaggacgatggaaactacaaaacccgagcagaagtgaaatttgaaggagacacactcgtaaatagaatcgaacttaaaggaatagacttcaaagaagacggcaacatcctaggccacaaactcgaatacaattacaatagccacaacgtctacatcatggccgataagcaaaagaatggaatcaaggtgaactttaaaatacggcacaatatcgaagacggttctgtccagctggccgatcattatcagcagaatacacccatcggtgacggaccagtgctgcttcccgacaatcactacctttctactcaatccgcattatccaaagatcccaacgaaaagcgcgaccacatggttctcctagaatttgtaactgcagctggaattaccctcggcatggacgagttatataagaggagccgagacatctcccatggatttccgcccgccgttgccgcccaagacgacggtaccttgcctatgtcgtgtgcccaagaatccggtatggatcgacacccagccgcgtgtgcctccgctcgcatcaatgtttaa

SEQ ID NO: 172 - DNA, 855 bp, Artificial Sequence
  Modified Open Reading Frame
atggtgagcaagggcgaagaattatttaccggcgtagtgccaatacttgtcgaattagacggcgatgtcaacggccacaaatttagcgtctctggtgaaggagagggcgacgccacctatggtaagctaaccctgaaatttatttgtacaaccggcaagctacccgtcccatggccaacgctcgtaacgaccttgacatatggagtgcagtgctttagtcgatatcccgatcacatgaaacaacacgacttctttaaatccgcaatgccagaagggtacgtgcaagagaggaccatcttctttaaagacgacggtaattacaaaacacgagcagaggtgaaattcgagggagatacattggtaaacagaattgagctgaagggaatagactttaaggaggacggcaatatactaggtcacaaattagaatacaactacaactcacacaatgtgtatataatggcagacaagcaaaagaatggcataaaagttaatttcaagataagacacaatatagaagatgggagcgttcaattagccgaccactaccagcaaaatacaccaataggcgacggtccagtactactacccgataaccattatttaagcacgcagtccgcactatcaaaagatcctaatgagaaacgtgatcatatggtcctcttagaattcgtaaccgccgcaggcataaccttgggcatggatgagctttacaagagatcacgggacatttcgcatggatttccgcctgcagtggcagcccaagatgacggcaccctcccaatgagctgcgctcaggaatcagggatggatcgacatcccgccgcatgcgctagtgcgcgaataaacgtataa

SEQ ID NO: 173 - DNA, 855 bp, Artificial Sequence
  Modified Open Reading Frame
atggtatcaaaaggagaagaactgttcacaggtgttgtaccgatcttagtcgagctagatggcgacgtaaacgggcacaagttctccgtatcaggtgaaggcgaaggagatgcaacatacggaaagctaacactaaaatttatctgcacgactggcaaactacccgtaccatggccaaccttggtgacaaccttaacatatggcgttcagtgtttctcgcgttatcccgatcatatgaaacagcacgatttctttaagtcagcaatgccagaaggatacgtccaagagcgcacaatattcttcaaagatgatggtaattacaaaacacgggccgaagtgaagttcgaaggagataccctggtgaatagaatagaattaaaaggaatagatttcaaagaagacggcaacattcttggacacaaactagaatacaattacaactctcacaatgtttatataatggcagacaaacaaaagaatggcataaaggtgaatttcaaaatcagacacaatattgaagatggcagcgtacaattagccgaccattatcaacaaaacacacccattggagatggccctgtcctactgcctgacaaccactacctgagtacgcaatctgcgctttcaaaagatccgaacgaaaagagggaccacatggtattgcttgagttcgtgacagccgctggaatcacgctcgggatggacgagttgtacaaaagatcacgtgatatttcccatggatttccgcccgccgtagctgcgcaagatgacggcactcttcctatgtcatgtgcccaggagtctggcatggatcgacaccctgcggcctgcgcctccgcccgtataaacgtataa

SEQ ID NO: 174 - DNA, 855 bp, Artificial Sequence
  Modified Open Reading Frame
atggtttccaagggcgaagaattgtttacaggagttgtgccgatattggtcgaattagacggagacgtaaacgggcataagttcagcgtaagtggagagggcgaaggagatgctacctatggcaaactgacactaaaatttatatgcacaaccggcaaacttccggttccctggccgaccctggttacaaccttgacttatggcgtgcaatgctttagccgctacccagaccacatgaaacaacacgatttcttcaaaagcgctatgccagagggctatgtccaagagcgaaccatattctttaaagatgacggaaactataaaaccagagctgaggtgaaattcgaaggcgacaccctcgtgaaccgaatagaactgaaagggatagatttcaaagaggacggaaacatactaggacacaaacttgagtacaattacaatagccacaacgtctacatcatggcagacaagcaaaagaacggtataaaggtgaatttcaaaattagacacaacattgaagacggaagtgtccagctggccgaccattaccaacaaaatacgcctattggcgatgggcccgtgctactgccggataatcattacctgagcactcaatcagcattaagcaaagacccaaacgagaagagggatcatatggtgttgctggagttcgtcacagccgccggcatcactctagggatggatgaattatataagagaagcagagatatttctcacggtttccctcctgccgttgccgcgcaggatgatggcactttacccatgtcttgtgcccaagaaagtggaatggaccggcaccctgctgcctgcgcttcagcccgcataaacgtataa

SEQ ID NO: 175 - DNA, 855 bp, Artificial Sequence
  Modified Open Reading Frame
atggtttctaagggtgaagaactatttacgggcgtggtccctatacttgtcgaactggacggtgacgtcaatggccataaattctccgtgtcaggcgagggcgaaggcgatgcgacctatgggaaattgaccttaaaatttatatgtacaactggaaaactgccagtcccttggccaactttagttactactttgacgtatggagtacaatgtttctcacgctatcctgatcatatgaagcaacacgacttctttaaatctgccatgccagaaggctacgtacaagagcggacaatattcttcaaggatgacggcaactataaaacaagagcggaagtcaaatttgagggcgatacgctggtcaacagaatagaactgaaaggtattgatttcaaggaggatgggaatatacttggccacaaactcgaatacaattacaactcccacaacgtgtatattatggctgacaaacaaaagaatggcataaaagtgaacttcaagattcggcataacatcgaagatggttctgtccaactggccgaccactatcagcagaacactcctattggcgacggccctgtactactgccggataaccactacctgtctactcaaagcgcactctccaaagatccaaatgagaaacgagaccacatggtattgcttgagttcgtaaccgccgctggaatcaccttaggtatggatgaattgtacaaacgctccagagatataagccacggcttcccgcctgccgtagcagcccaagacgacggcaccctccctatgtcatgcgcacaggaatccggtatggatcgtcacccggccgcctgcgcttccgcacgcatcaatgtctaa

SEQ ID NO: 176 - DNA, 855 bp, Artificial Sequence
  Modified Open Reading Frame
atggtttcaaaaggtgaagaattattcacaggcgttgttcctatccttgttgaacttgacggcgacgtaaacggacataaattctcagtcagcggtgagggagaaggagacgcgacttatggaaagctgaccctcaaatttatatgtacaaccgggaaattacccgtgccctggccaaccctcgttacaactctgacatacggcgtgcagtgcttctccaggtatcccgatcatatgaaacaacatgacttcttcaaaagcgcaatgccagaaggctatgtgcaagagcgcaccatcttctttaaggacgacggaaattacaagacacgtgcagaggtgaaatttgaaggcgatacgctggtcaaccgaattgagctgaaaggaattgactttaaagaggacggaaacatactaggacataaactcgaatataactataacagccacaacgtgtatatcatggcagacaagcaaaagaacggcataaaagtgaacttcaagatccggcataatatcgaagacggctccgtacagctagcagaccactatcaacagaatacaccgattggagatggccctgttctgctcccggataaccattacctgagtacccagtccgctctgtctaaggacccgaatgaaaagcgagatcatatggtgctcctcgaatttgtcaccgcagcaggaattacccttggaatggacgagttatataaaagaagccgcgacatatcgcacggtttcccgcccgctgtagctgctcaagacgatggaaccttacctatgtcatgtgcgcaagaatccggcatggaccgccacccagcagcctgtgcatccgcccgcatcaatgtttaa

SEQ ID NO: 177 - DNA, 855 bp, Artificial Sequence
  Modified Open Reading Frame
atggtgtctaaaggcgaagagctcttcactggagtggtaccgattctggtggaattggacggcgacgtcaacgggcacaagtttagtgttagcggcgagggcgaaggtgatgcgacttatgggaaactcaccctgaagtttatttgtactacagggaagttgcccgtgccttggccaacgctcgttacgaccttgacgtacggtgtgcagtgcttcagtcgatatccagatcacatgaagcaacatgacttcttcaaatcggcaatgccggaaggatatgttcaggagcgtactatcttcttcaaagatgacggcaactacaagactagagccgaggttaaattcgagggagacactctcgtgaaccggatcgaactgaagggcattgatttcaaggaggatggcaacatcttgggccataagctggagtataattacaacagccataatgtatatattatggctgacaaacagaagaatggcatcaaggtgaacttcaagataaggcataacattgaagacgggtcggttcagctggcagaccactaccagcagaacactccgatcggagatggaccggtcctcctccctgataatcactatctgagcacacagagtgcccttagtaaggatccaaatgagaagagggaccacatggtcctgcttgagttcgtgaccgctgctggaataacgttagggatggatgagctgtacaagagatctcgggatatctcccatggctttccacccgccgtcgcagcccaggacgacgggacccttcccatgagctgtgcccaagaaagcggtatggatagacatccagccgcttgtgcatcagctcgtattaacgtttaa

SEQ ID NO: 178 - DNA, 855 bp, Artificial Sequence
  Modified Open Reading Frame
atggtgtcaaagggagaggaactcttcaccggcgtggtgcctattctcgttgagctcgatggagatgtcaatggacacaagttcagcgtctctggtgaaggcgagggtgatgccacatatggtaaactcacgctgaagttcatctgtacgacaggtaaacttccagttccgtggcccacgctggtcacgacgctgacttacggagtgcagtgcttctccagatatccagatcacatgaaacagcatgacttctttaaaagcgccatgcctgagggttatgtccaagaaagaacaatattctttaaggacgacgggaattacaagacccgagctgaggtaaaatttgagggtgacactctggtcaacagaatcgagttgaaaggtattgatttcaaggaagatggaaacattctgggtcacaagctggagtataattacaactctcacaacgtctatataatggcggataagcagaagaatggcattaaggttaacttcaaaatccgccacaacatagaggacggcagcgtccagctggccgaccactaccagcagaacacaccgatcggtgatgggcccgttctgctacctgacaatcactatctttcgactcagagcgccctgtctaaagacccgaacgagaagcgcgaccacatggtgctactcgagttcgtcaccgcagctggcataaccttaggaatggatgagctttacaagaggtcacgagatatcagccacggtttcccaccagccgtcgctgctcaggacgatgggacactgcctatgtcgtgtgcccaggaaagtggcatggatcgtcatcctgccgcatgcgcttctgcaagaattaacgtgtaa

SEQ ID NO: 179 - DNA, 855 bp, Artificial Sequence
  Modified Open Reading Frame
atggtgagcaagggagaagagctcttcactggtgtggtgccaattcttgttgaattggatggtgatgttaacgggcataagtttagcgtctccggcgaaggcgaaggcgacgcaacttatggcaaactgaccctgaagttcatttgcacaacgggcaagctgcccgtgccatggccaactttggtcacgacgctcacgtacggcgttcagtgtttctccagatatcccgatcacatgaaacagcatgacttcttcaaatcggccatgcccgagggatatgttcaggagcggaccatattcttcaaagacgatgggaattataagactcgcgctgaagtgaagttcgagggtgacactcttgtgaaccggatcgagctcaagggcatcgatttcaaggaggacggcaatatccttggtcacaagctcgagtacaactataattcccataacgtctacatcatggccgataaacagaagaacggcataaaggtgaacttcaagatcagacacaacatcgaggacgggagtgttcagctggcagaccactatcagcagaacactccaattggcgacggccctgtccttctgcccgataaccattacctatccactcaaagcgccctctctaaagatccgaacgaaaagagggaccatatggtgctcctagaatttgtcacagctgccgggatcaccctgggaatggacgagctctataagcggtcaagggacatatcccacgggtttcctcccgcggtggctgcacaggacgatgggacgttgcccatgtcctgtgcacaagaaagcgggatggatcgacatcctgcggcttgcgcgagcgctcgtataaatgtgtaa

SEQ ID NO: 180 - DNA, 855 bp, Artificial Sequence
  Modified Open Reading Frame
atggtcagcaagggcgaggagctgtttacaggagttgtcccgatcctggtggaactggacggtgatgtgaacggccacaagtttagtgtctctggagagggagagggagacgccacctatggtaagctgacgctgaagtttatctgcaccacgggcaagctcccggtaccctggccaaccctcgtcactacgctgacctacggtgtgcagtgctttagccgatatcctgatcacatgaagcagcatgacttcttcaagagcgcgatgcctgagggctacgtgcaggagaggaccatcttcttcaaggatgacgggaactacaagacgcgtgccgaggtgaagtttgagggcgataccctggtgaaccggatagagctgaaaggcatagatttcaaggaggacggcaatattcttgggcacaaactcgagtataattacaacagtcataacgtgtatattatggcggataaacagaagaacggcataaaagtcaacttcaagattcgccataatatcgaggatgggagcgtccagctggcggaccattaccagcagaatactccgattggcgatggtcccgtcttgctgcccgacaaccattatctctcgacgcagtccgcactgtcaaaggaccctaacgagaagcgtgatcatatggttctcttagagttcgtgacagcggcgggcatcacgttgggaatggatgaactgtataagcgcagtagggatatatcccacggattcccgcccgcggtagcagcccaagacgatggaactctccctatgtcctgtgcccaagaatccgggatggatcgccacccggcggcgtgtgcctccgctaggattaatgtctaa

SEQ ID NO: 181 - DNA, 855 bp, Artificial Sequence
  Modified Open Reading Frame
atggtgtcgaagggtgaggaattgttcactggagtggttcccatactcgttgagctggacggagatgtcaacggacataaattctccgtatccggtgaaggagagggcgacgctacctacggcaagttgaccctcaagtttatttgtaccaccggtaaactcccagtgccttggcccacgttggtgacaacgctaacgtacggcgtacagtgctttagcaggtaccctgaccacatgaagcagcatgatttcttcaagagcgccatgccggaagggtatgtgcaagagcgcaccatcttctttaaagacgacggtaactacaaaacgcgggctgaggtgaagtttgagggcgacaccctagttaaccgcattgaactcaagggcatcgacttcaaagaggatgggaacatactcgggcataagctagagtataattataacagccacaatgtatacattatggctgataagcagaagaacggaatcaaggtcaacttcaaaatccgccacaacattgaagacggttctgtgcagctagccgaccattaccaacagaacacaccgattggtgatgggcccgtgctgctgccagacaaccattatctttcaacgcaatcggcattgagcaaggatcctaatgaaaagcgtgaccatatggtgctcctggagtttgttacagcggctgggattacgctgggaatggacgagttatataaacggtccagggacatttcccacggctttccaccggcggtcgctgcgcaagatgacggaactttaccgatgtcttgtgcccaggagtccggtatggatcgccacccagctgcgtgcgcatcggctagaataaatgtgtaa

SEQ ID NO: 182 - DNA, 855 bp, Artificial Sequence
  Modified Open Reading Frame
atggtgagtaagggtgaggaactgtttacaggcgtggtcccaattctggtcgagcttgatggagacgttaacggacacaagtttagtgtgtccggtgagggagagggcgacgcaacatatggtaagcttactctcaagttcatctgcactaccggtaagctgcctgtcccatggcctaccctggtgactacgcttacctacggagtgcaatgcttctcacgatatccagatcacatgaagcagcacgatttcttcaaaagcgctatgccagaagggtacgtgcaagaaagaaccatcttcttcaaagacgatgggaactataagacaagagcagaggtgaagttcgaaggcgacaccttggtgaatcgtatcgaactcaagggaattgatttcaaggaagacggaaatattctaggacacaaactggaatataactacaattcccacaacgtctacatcatggccgacaagcagaagaatgggataaaggtaaatttcaagattcggcataatatagaggatggatcggtacagctggcagatcactaccagcagaacacgccgatcggcgacggtcctgttctcttgccggataatcattacctttccacgcaatccgccctttcgaaggatcccaatgagaagcgagatcacatggtattgcttgaattcgtcacggctgctggtatcaccttaggtatggacgagctgtacaaaaggtcacgggatatatcccatggatttccgccggccgtggcggctcaggatgacgggacgctgcccatgtcctgtgcacaggagagcgggatggatcggcacccggccgcctgcgcttcggcgagaatcaacgtgtaa

SEQ ID NO: 183 - DNA, 855 bp, Artificial Sequence
  Modified Open Reading Frame
atggtttctaaaggtgaggaattattcaccggagtggtgcctattctggtagaactagatggagacgtgaacgggcacaagttcagcgtcagtggagagggtgaaggagatgctacttacggcaagttgaccttaaaattcatttgcactacgggaaagcttcccgtaccatggccaactctggttaccacgttgacatatggcgtacagtgtttctcccgctacccagaccacatgaagcaacatgatttcttcaagagcgcaatgcccgaaggctacgttcaggagcggaccatcttcttcaaagacgatgggaactataagacccgtgccgaagtaaaatttgaaggcgacacactcgtcaatcgaatagaactgaagggtatcgacttcaaggaagatgggaacatcctcggccacaagctggagtataattacaacagccataatgtttatattatggctgacaagcagaagaatggaataaaggtaaactttaaaatccgacacaacatcgaggatggcagcgtacagttggcggaccactaccaacagaacactccaatcggcgatggacctgtccttctgcctgataatcattacttaagcacgcagtccgccctgtctaaggacccgaacgagaagcgagatcacatggtgctgctggagttcgtcaccgccgcaggcatcaccttgggcatggatgaactttacaagagatcacgggatataagccatggctttccacccgccgtcgccgcccaggacgatggaactctacccatgtcgtgcgcccaagagtccggcatggatagacaccctgcggcctgtgcgtcagcaaggattaacgtgtaa

SEQ ID NO: 184 - DNA, 855 bp, Artificial Sequence
  Modified Open Reading Frame
atggttagcaaaggcgaagagctgtttaccggtgtcgtgcccattctggtggagttggacggagacgtgaacggtcacaaattctcggtgtctggcgagggcgaaggcgacgcgacctatggcaaattaacactcaagtttatttgcaccacaggcaagctgcccgtcccttggccaacactggtgacaacgcttacgtatggcgtccaatgtttctcaaggtatcccgaccacatgaagcagcacgacttcttcaagtcggctatgccggaagggtacgttcaagaaagaaccatcttcttcaaagacgatggaaactacaagactcgagcagaggtgaagtttgagggagatacactggttaacagaattgaactcaaaggaatcgacttcaaggaggacggaaacatccttgggcacaaattagagtacaattataatagccataacgtgtatatcatggcagataaacagaagaatggcataaaagtgaacttcaagatccgtcacaatatcgaagacgggtcagttcaactcgcagaccattatcagcaaaatacacccataggcgatgggcccgtcctgctacctgataatcactacctgagtacgcagagtgcattgtccaaagatcctaatgagaagcgcgaccacatggtcttactggagttcgttaccgccgccggtataacactgggcatggacgaactttataaaaggtctcgcgacatttctcatggcttcccgccggcagttgctgcccaggacgacggcacattgcctatgtcgtgcgctcaagaaagtgggatggatcggcatcctgctgcttgtgcgtccgctagaattaacgtgtaa

SEQ ID NO: 185 - DNA, 855 bp, Artificial Sequence
  Modified Open Reading Frame
atggtcagtaagggcgaggaactcttcactggcgtggtgcccatactagtggagctcgacggagacgtcaatggacataagttctcggtttccggtgagggtgaaggcgatgccacatacggcaagctgacattgaaattcatatgtaccacgggcaaactcccagtaccgtggccgactctagtcactactctgacatacggagttcagtgctttagtcgataccctgatcacatgaagcagcacgacttctttaagtctgctatgcccgagggctatgtccaggaaagaactatcttctttaaagatgatggtaattataaaaccagagctgaagtaaagtttgagggagacacgcttgtcaataggatcgaactcaagggcatcgactttaaagaagatggtaatattctcgggcacaagctggagtataactacaactctcataatgtttacattatggccgataaacagaagaacggcataaaggttaactttaagatccggcacaatattgaggatggctccgttcaactggcggaccactaccagcagaacacacccatcggcgatgggccagttcttctgcccgataaccattatctttccacccagtctgccttgagcaaggatcccaatgaaaagagagatcacatggtccttctagagtttgtcaccgcagctggtattacgctcgggatggatgaactctacaagagatctcgtgatatctctcatggctttccgccggccgtcgccgcacaagacgatgggacacttcccatgagttgtgcacaggagtccggaatggaccggcaccctgccgcctgtgcgtcggccagaattaatgtataa

SEQ ID NO: 186 - DNA, 855 bp, Artificial Sequence
  Modified Open Reading Frame
atggtgtctaaaggcgaggagctcttcaccggtgtcgttccgatcctggtcgaactggacggagatgtcaatggacataagttctctgtttctggcgagggagagggagatgccacatatggaaaactcacactcaagttcatttgcaccacaggcaagttacccgtgccgtggccgacgctggtgaccacactgacgtacggcgtgcaatgcttctcccgataccctgatcatatgaaacagcatgatttcttcaaatctgctatgccagaaggttacgtgcaggagcggaccatcttcttcaaagatgatggtaattataaaactcgtgctgaggtgaaatttgagggagatacattagtgaatagaatcgagcttaaagggatcgactttaaggaagatggtaacatcttgggccacaagctcgaatacaactacaactcccacaatgtgtacatcatggcagataagcaaaagaatgggatcaaggtcaacttcaaaattaggcataatattgaagatggctcggtccaactggccgatcactatcagcaaaatacaccgattggtgacggacccgttcttctgcccgataaccattacttatcgacccagtccgcgctctcaaaagacccaaatgagaaacgcgaccacatggtgctccttgagttcgtgaccgccgcgggcatcactctcggcatggacgaactgtataagaggagtagagatatcagccacgggttccctcctgccgtggctgcgcaggatgatgggacgctgcccatgtcctgcgcgcaagagagtgggatggatagacatccggctgcctgcgctagcgctcgcattaatgtgtaa

SEQ ID NO: 187 - DNA, 855 bp, Artificial Sequence
  Modified Open Reading Frame
atggttagtaaaggcgaagaattattcacaggcgtggtccctatcctggtggagctggatggagatgtaaacggccacaagttctccgtgtctggtgaaggagaaggtgacgcaacttatggaaagctgactctgaagtttatttgcacgaccggtaaactcccagtgccttggccaacacttgtaacaactttgacatatggagtccagtgtttctcccgttatcctgaccatatgaaacagcatgacttcttcaaaagcgcaatgcccgagggttacgtgcaagagcggactatattctttaaggacgacggcaattacaagacacgagcggaggtaaaatttgagggtgatacactcgtgaaccgaatcgaactgaagggcatcgactttaaggaggacggaaacatactagggcataaacttgaatataattacaacagtcacaatgtctacataatggcggacaagcagaagaatggtataaaggttaatttcaaaatccgacacaacatagaagacggctccgttcaactcgcagaccattatcaacagaatactcccataggtgacggtcccgtcctgctccctgacaaccattacctaagcacacaatcagccctttccaaggacccaaatgagaaacgtgaccacatggtgctccttgagtttgtcactgctgccggtataactttgggcatggatgaattgtataaaagatcacgcgatatcagtcacggcttcccacccgctgtagccgctcaggacgacggcaccttgcctatgagttgtgcacaagaaagtgggatggaccgacacccggccgcatgtgccagtgcccgaatcaacgtttaa

SEQ ID NO: 188 - DNA, 855 bp, Artificial Sequence
  Modified Open Reading Frame
atggttagcaagggcgaagaactgttcacaggcgtcgtgcccatcctcgttgagttggacggtgatgtgaatggccataagttcagcgtttcaggagaaggtgagggcgacgccacatacggtaagctgactctcaagttcatttgtacgaccggaaagttgcctgttccctggcccacattggttactacccttacttatggtgttcagtgtttctcacggtatccagatcacatgaagcagcatgatttctttaagagtgccatgccggaaggatatgtccaagagagaacaatattctttaaagatgatggtaactacaagacccgcgccgaagtgaaatttgagggagatacattagttaacagaattgaactcaaaggcattgactttaaggaagacggcaatatacttggccataagctggaatataactacaactctcataatgtctacatcatggccgataaacagaagaatggaataaaagtgaactttaagattagacataacatcgaagacgggtcagtgcaactcgcggatcattaccaacaaaatacacccattggagacggccctgtgttactgcctgacaatcactacctttcaacccagtccgccttatcgaaagaccctaatgaaaagagagaccacatggtgttactagagtttgtaaccgcagccggaataacactgggaatggatgaactgtataagagatctagagacatttcgcatggcttcccaccagcagtagcggcccaagatgacggcaccctccctatgtcatgtgcacaagagtccggtatggatagacatcccgcagcgtgcgcctctgcacgcattaatgtgtaa

SEQ ID NO: 189 - DNA, 855 bp, Artificial Sequence
  Modified Open Reading Frame
atggttagcaagggagaagagttgtttacaggagttgttccaatcttggtcgaattagacggcgatgttaatggtcacaagttctccgtaagtggcgagggagaaggagacgcgacctatggaaagttgaccctcaaattcatctgcacaaccggaaagctgcctgtgccttggcctaccctggtgaccactctgacctacggcgttcaatgctttagccggtatccagaccatatgaaacagcatgacttctttaaaagcgcaatgcccgagggctatgttcaagaacggactatattctttaaagacgatggtaattacaaaacacgtgccgaagtgaaattcgaaggagataccctggttaaccgcatcgaattaaagggtatcgatttcaaggaggatggcaatatcttaggacataagctcgaatataattataatagtcacaatgtctacataatggccgacaaacaaaagaatggtataaaagtgaactttaaaataagacacaatatcgaagacggttccgtacaactggctgaccattaccaacaaaatacgcccatcggagacgggccggtcctgctgccggacaaccactatctcagtacgcaatcagccctatcaaaagacccaaacgagaagagagaccacatggtgttacttgagttcgtgacagctgccggcataaccttgggcatggatgagttgtacaagcgtagccgagatatcagccacggatttccacccgcagtagccgcacaggatgacggtactttacccatgtcgtgcgctcaggaatcaggcatggataggcacccagccgcgtgcgcctccgctcgtattaacgtgtaa

SEQ ID NO: 190 - DNA, 855 bp, Artificial Sequence
  Modified Open Reading Frame
atggtttccaaaggagaagagttatttacgggagtagtaccgatactggtggagctagatggtgacgtgaatggccacaaattctccgtatccggagaaggcgagggtgacgccacttatgggaaactaacactgaagttcatctgcacgacgggtaagctcccagttccttggccaacattagtaacaaccctcacgtatggtgtccaatgcttcagtagatatcccgaccatatgaaacaacatgacttcttcaaaagtgctatgccagaaggatacgtccaggagcggaccatcttctttaaagacgacggtaactacaaaacaagagcggaggttaaattcgagggtgatactctggttaatcgtattgagttaaaaggtattgatttcaaggaggatggaaatattctagggcataaactcgagtacaattataattctcacaacgtgtacattatggccgacaaacaaaagaatggtatcaaagtgaatttcaagatcagacacaatattgaagacgggtcagtgcaactcgcagatcactaccagcagaatacaccaattggcgatggcccagtgctactgccggacaaccactacctttccacacaatcagctctgagtaaagatcctaatgagaaaagagaccatatggtgctccttgaatttgtaacagcagcaggcatcacactgggcatggatgaactttataagcgcagtagagatatatcgcacggcttcccaccagccgtggcagcgcaagacgatgggactcttccgatgtcctgcgcccaggaaagtggcatggataggcatcccgcagcctgtgcctccgctcgcataaatgtttaa

SEQ ID NO: 191 - DNA, 855 bp, Artificial Sequence
  Modified Open Reading Frame
atggtttccaaaggtgaggagctgtttaccggagtagttccaatccttgtcgaactggatggcgatgtaaatggacacaaattctctgtgagcggtgaaggagagggcgacgctacgtatggtaaactaacacttaaatttatatgcactactggaaaactacccgtgccttggcccacactagttacgacacttacttacggcgttcagtgtttcagccggtacccagaccatatgaagcaacatgatttctttaaaagtgctatgcccgaaggatatgtgcaggagcggacaatcttctttaaggatgacgggaattataagacacgtgctgaggtaaagtttgaaggagacaccctcgtaaacaggattgagttgaagggaatcgactttaaggaggatggaaatatacttggccacaaactagagtacaattataacagtcataacgtatatatcatggcagacaagcagaagaatgggatcaaagtgaactttaaaattcggcacaacatcgaagacggatccgtgcagctcgccgaccactatcagcagaacacaccaattggcgatggaccagtccttctgccggacaaccattacctttcgacacaaagtgcgctgagcaaagatccaaacgaaaagagggaccacatggtgttactcgagttcgtgaccgcagccggaataaccctgggaatggatgaactttacaagaggagcagagatattagtcacggattccctccggccgtcgcagcgcaagatgacgggacactgcctatgagctgtgctcaggagagtgggatggatcgccatcccgccgcttgtgcctccgccaggatcaacgtataa

SEQ ID NO: 192 - DNA, 855 bp, Artificial Sequence
  Modified Open Reading Frame
atggtatcaaagggagaagagttatttacaggcgtggttcccatactggtcgaactggatggcgatgtgaacggccacaaatttagcgtctctggagaaggtgaaggcgatgctacctatggcaaactaacgttgaaatttatctgtacaaccggcaaactccctgtgccctggccaacccttgtgactacccttacttatggcgttcagtgctttagccgatatcccgaccacatgaaacagcacgatttcttcaagtccgctatgccagaaggctatgtgcaagaaaggaccatattctttaaggatgacggcaattacaagactagagccgaggtaaagttcgaaggtgacacactggtaaatagaatagagctcaaaggaattgatttcaaagaggatgggaacattctaggtcataagctcgaatacaactacaactctcacaatgtctatatcatggctgacaaacagaagaatgggattaaggtgaacttcaaaatacggcataacatcgaagatggctcagtccagctagccgatcattatcagcagaacacaccaataggcgacggtcctgtactcctgcccgataaccattacttgtccactcaatctgcactatctaaggatcccaacgagaaaagagaccacatggtgctactggaattcgttaccgcggctggcattacactgggtatggatgagctatacaagcgctcccgagatatttcccacggtttccctccagctgttgcggcccaggatgatggcacccttccgatgtcttgcgcacaggaatccgggatggatagacatccagcagcatgtgcctcagctcgtataaacgtgtaa

SEQ ID NO: 193 - DNA, 855 bp, Artificial Sequence
  Modified Open Reading Frame
atggtctccaaaggcgaagagttatttacgggagtagtaccaatattagttgaattagatggtgacgtcaatggtcacaagttcagtgtatcgggagaaggtgaaggtgacgcaacctatgggaagttaactctgaaatttatatgtaccaccggaaaactgccagtgccatggcccacacttgttaccactctgacctacggtgtgcagtgctttagccgttacccggaccatatgaaacaacacgacttcttcaaatcagcaatgcctgaaggatatgtgcaggaaaggacgatattctttaaggatgacggtaattacaagactcgagccgaagttaagttcgagggcgataccttggtaaaccgcattgagctgaaaggtatcgatttcaaggaagacgggaatatcttagggcacaaacttgaatataactacaattctcataatgtgtatataatggccgataagcagaagaatggaatcaaggtaaacttcaaaattagacacaacatcgaagacgggtctgtacagctcgcggatcactaccagcaaaacactccaattggcgatggccctgtgctcctgcctgataaccactacttgagtactcagtccgcactttccaaagaccctaacgagaagagagatcacatggtattgttggagtttgtgaccgcggcgggcataacactcgggatggatgagttgtataagcgttcgagagatatcagtcatggattcccacctgctgttgccgctcaggacgacggcactttgcccatgtcctgcgctcaggaatctggcatggatagacaccctgctgcgtgtgcctccgcccgaataaacgtgtaa

SEQ ID NO: 194 - DNA, 855 bp, Artificial Sequence
  Modified Open Reading Frame
atggtaagtaagggagaggagttgttcactggtgtcgtcccaattctggtcgagttggacggagatgtaaacggtcacaaattctcggtcagcggcgagggagagggcgatgccacatatggaaaacttactcttaaatttatttgtacgactggcaagctccctgtcccttggccgactctggtgacaacacttacatatggagtacaatgtttctcacgataccctgatcacatgaagcaacatgacttctttaaatccgcaatgccagagggctatgtgcaggaaaggacgatcttcttcaaggacgacggaaactacaagacacgtgcagaggtaaagtttgaaggtgatactctcgtaaatcgcatagaactgaaagggattgactttaaggaagacggcaatatacttggacacaaactggagtacaactataattctcacaatgtatatatcatggctgacaaacagaagaatggcattaaagtgaacttcaagataagacataacatagaggacggatctgtgcaacttgctgaccactatcagcaaaacactccaataggtgacggccctgttctgcttcccgacaaccactacctgtccacgcaaagcgccctcagtaaagacccaaacgagaagagggaccacatggtgttgttagaattcgtgactgctgccgggattacactaggaatggatgagttatacaagaggagtcgagacatatcccatggatttccaccagctgtagccgcccaggacgacgggaccttgcccatgtcttgcgcccaggagtcaggcatggatcggcatcctgcagcctgcgcatctgcccgcatcaacgtttaa

SEQ ID NO: 195 - DNA, 855 bp, Artificial Sequence
  Modified Open Reading Frame
atggtttccaagggcgaagagttgttcacaggagttgttccaattctcgtagagctggatggcgacgtcaacggacacaaattcagtgtcagcggagaaggcgaaggcgacgccacttacggtaaattaaccctgaaatttatttgcacaacaggaaaacttccggtgccatggcccactcttgtcaccaccctcacctatggagtacagtgctttagtcgctatcctgatcacatgaagcagcatgacttctttaaaagcgccatgcctgaaggatacgtgcaggagaggactatcttcttcaaagacgacggtaattacaagacccgggctgaagtgaaattcgaaggcgacactctggtgaatagaatagaactgaaaggcatcgactttaaggaagatggaaatatattaggccataagctcgaatacaactacaattcccataacgtgtatatcatggccgacaagcaaaagaatggcatcaaagtgaactttaaaatacggcataacattgaggacggttcggttcaattagcggatcattaccagcagaatacacctattggcgacggcccagtactcctgcccgataatcattacctgtctacccaatccgccctttccaaggatccaaatgagaaaagagatcacatggtcctcctcgaattcgtaacagctgcaggaataacacttgggatggacgaactttataagcgctctcgcgatatctctcacggatttccgccggcagtagccgctcaggacgatggaaccctgccaatgtcatgcgcacaagagtcaggcatggatcggcatcccgccgcttgcgcctcagcccggattaacgtataa

SEQ ID NO: 196 - DNA, 855 bp, Artificial Sequence
  Modified Open Reading Frame
atggtatcgaaaggagaggagctctttaccggcgtggtgccaattctcgtggagctagatggcgatgtgaacggccacaaattctccgtctcaggagagggcgaaggcgatgccacttacgggaagctcaccctcaagtttatctgcacaaccggcaaattacctgttccttggcctaccctagtcacaactcttacctatggtgtgcaatgtttctcaagatacccggaccacatgaagcaacatgatttctttaagtcagcgatgcctgagggttatgttcaagaacgcacaatcttcttcaaagacgacggaaattacaaaacacgggcggaggtgaaattcgagggagatactttagtaaaccggatagagctcaagggcatcgatttcaaagaggacggcaatatacttggacataagctcgaatacaactataacagtcataatgtgtatataatggcagataaacagaagaacggaataaaggttaatttcaagattaggcataacatcgaagacggtagcgttcaactggccgaccactaccaacagaacacacctataggagacggacccgtactactaccagataatcactacctgtccactcaaagcgccctatcaaaggacccgaatgaaaagagggatcatatggtcttgctggagtttgtgaccgccgctgggattacacttggaatggacgaactgtacaaaaggagtcgcgatatctcccatggattccctccagctgtcgccgcccaagacgatggtacactgcccatgagctgcgcacaagagtctggaatggatcgtcaccctgccgcttgtgcatctgccaggataaacgtataa

SEQ ID NO: 197 - DNA, 855 bp, Artificial Sequence
  Modified Open Reading Frame
atggtatcgaagggagaggaattattcaccggcgtcgtgcccattctcgtggaacttgatggcgacgtgaatggtcataagttctctgtgtctggtgaaggagagggcgacgcgacttatgggaaactgactctgaaatttatatgtacgacgggcaaattaccagttccatggccgaccttggtaactaccttaacctatggcgtgcaatgcttctctagatatcctgaccacatgaaacagcatgacttcttcaaaagcgctatgccagagggttatgtgcaagaaaggacgatattctttaaagatgatggcaattataaaacccgtgcggaagtgaagttcgagggagatacattggtgaaccgcatagaattgaagggcattgacttcaaagaggacggcaatatactcgggcataagctagagtacaattataactcccataacgtctacattatggcggacaaacaaaagaacgggatcaaggtcaacttcaaaatcaggcataatattgaggatggaagcgtgcaacttgcagatcattaccaacaaaacactcctattggcgatggcccggtcctgctacctgacaaccattacttatcgactcaatccgccctatcgaaagaccctaacgagaaacgcgatcatatggtgttgttggaattcgttaccgcggcaggcataacattagggatggacgagctttataagcgctcacgagacataagccatggatttcctccggccgttgctgcacaagacgatggcacgctgcctatgtcctgcgctcaagaatcaggtatggacaggcatcccgctgcctgtgcgtcggcccgtattaatgtctaa

SEQ ID NO: 198 - DNA, 855 bp, Artificial Sequence
  Modified Open Reading Frame
atggtaagcaagggcgaagagctgtttaccggcgtggtaccgatattggtagaattagatggcgacgtgaatggacataagttctcagtgagcggagaaggagaaggtgatgctacttacggcaagttgaccctaaagttcatttgtactaccggcaagctcccagttccgtggccgactctagttactacgttgacctacggtgtgcaatgtttcagcaggtacccggaccacatgaaacaacatgatttcttcaagtctgccatgcctgagggctacgtgcaggaaaggaccatattctttaaggacgacggcaactataaaacaagagcggaagtaaaatttgaaggtgatacattggtaaatcggatagagctcaagggaatcgacttcaaggaggatgggaatatcttgggccacaagttagaatataattacaactctcataacgtctacatcatggcagataaacagaagaacggcatcaaagttaatttcaaaataaggcacaacatcgaggatggctcagtacaattggcggaccattatcagcaaaacactcctatcggtgacggcccagtcctgctcccagataatcactacttatcaactcaatctgctctgagcaaagaccctaacgagaagagagatcatatggtactactggagtttgttacggctgcgggcattactcttggaatggatgagttgtacaaaagaagccgggacatttcgcacggctttccaccagctgtcgctgcccaggatgatggtactctgccgatgtcatgtgcccaagaatcgggtatggacaggcatccggccgcctgtgcatccgctaggatcaacgtgtaa

SEQ ID NO: 199 - DNA, 855 bp, Artificial Sequence
  Modified Open Reading Frame
atggtgagtaagggtgaggaattattcacgggcgtcgtaccgattctcgtggagttagacggtgatgtgaatggacacaagttcagcgtgtctggcgaaggcgagggcgatgctacatatggtaaactaactctcaaattcatatgcactaccgggaagctgccggttccatggccgaccttggtcacaacattgacatatggagtccagtgcttcagtcggtatcctgatcacatgaagcagcatgatttcttcaagtcagccatgcccgagggctacgtgcaagaacgcaccatcttcttcaaagacgacggaaattacaaaacaagggctgaggttaaattcgaaggagacactctggtaaaccggatagagctgaaagggatcgacttcaaagaagatggcaatattctcggacacaagctagaatacaactacaattcacataatgtatacatcatggccgacaaacagaagaatggaataaaagtcaactttaagatcaggcataacatcgaggatggaagtgtccagctcgcagaccactatcaacaaaacacaccaatcggcgacggcccagtactgctgccagataatcactacctcagcacacagtccgcattatcaaaagatcccaatgagaaaagagaccacatggtgttacttgagttcgtgactgccgccggaatcaccttagggatggatgaactgtacaagcgctcacgggatatctcacatggctttcctccagcagtcgctgctcaggacgacggcacgctaccaatgtcttgcgcccaggaatctggcatggatcggcaccctgcggcatgcgcttccgcccgaatcaatgtttaa

SEQ ID NO: 200 - DNA, 855 bp, Artificial Sequence
  Modified Open Reading Frame
atggtctcgaaaggagaagaactatttacgggcgtcgtgcctattctggtggaactcgatggcgatgtgaatggtcacaaatttagtgtttcgggcgaaggcgaaggcgatgccacctacggcaagttaacattaaagttcatatgcactaccggcaagttgcccgttccatggccaactcttgtaacgacgcttacctacggcgtacaatgcttctcacgctatcccgatcatatgaaacagcacgacttctttaagagcgctatgcctgaaggttatgtccaggagagaacaatattcttcaaagatgatgggaattataagactagggctgaagtaaagtttgaaggcgacacgcttgtaaatagaattgaactaaaaggaatagatttcaaagaggacgggaatattctaggtcataaattggagtacaactataatagccacaacgtttatatcatggcagataagcagaagaacggaatcaaagtgaatttcaagatacggcataacattgaggatggcagcgtgcagttagccgaccactaccagcaaaacacgcccataggagacggaccagttctgttacccgataaccactacctgagcacacagtcagccctgtcaaaagatccgaatgagaaacgcgatcatatggtattgctggaatttgtcactgctgcaggcattacgctcggaatggatgaactatacaagaggtctcgggatatttcgcatggatttccacccgctgtagccgcgcaagatgacggaacactgcccatgagctgcgcacaagagtctggtatggacaggcaccctgcggcctgtgcgtctgcaaggattaatgtctaa

SEQ ID NO: 201 - DNA, 855 bp, Artificial Sequence
  Modified Open Reading Frame
atggtgtcgaaaggagaagagctgtttaccggagtggtgccgatactcgtggaattggacggagatgtaaacgggcataaattctcggtgtcaggagagggagaaggcgatgccacctacggcaagctcacactgaagttcatctgcacaacagggaaactgccggtgccgtggcccaccttagtgactacactgacctacggagtgcagtgcttcagccggtaccctgatcatatgaaacaacacgatttcttcaaatcggctatgccagaaggctacgttcaagagcgcactatattcttcaaagacgatggcaactataaaacacgagcggaggtcaaatttgaaggcgacacattggtcaacaggatcgagctcaaaggcattgatttcaaagaggatggcaatatactaggccacaagctcgagtataactataactcacataacgtctatatcatggccgacaaacaaaagaacggtatcaaggttaacttcaaaattcgacataacatagaagacggcagcgttcaactcgcggaccactatcagcaaaatacaccaattggagatggaccagttctcctgccagacaaccactacctatccacccaatctgccctatctaaggatccaaacgaaaagcgcgaccacatggtccttctggagttcgtgaccgctgcaggcataacactcggtatggacgagctgtataaacgctcaagggatatcagccacggtttcccacctgcggtcgcagcccaagacgacggaacactaccaatgtcctgtgcacaagaatctggtatggacagacatcccgcagcctgtgcctcagcccgcattaatgtttaa

SEQ ID NO: 202 - DNA, 855 bp, Artificial Sequence
  Modified Open Reading Frame
atggtgtcgaagggtgaagagctatttacgggcgttgtacctattctcgtggaactggacggtgatgtgaatgggcataaatttagtgtttctggtgagggagagggcgatgctacctacggcaaattgacacttaaatttatatgcaccaccggtaaattgcccgtcccttggccgacgctggttaccacattgacatacggtgtgcaatgcttcagccgttaccctgaccatatgaagcaacatgacttctttaaatccgctatgccagaaggttacgtccaggagcgcacgatattcttcaaggatgacgggaattataagaccagggcagaggttaagttcgagggcgacactctggtgaataggatagagttaaaaggtatcgatttcaaagaagacggaaacatcctgggtcataagctggaatataactataattcccacaacgtctatattatggcagataagcagaagaacggcataaaagtaaatttcaagatacgacacaacattgaagatggttccgtccagttagccgaccactaccagcagaacactcctattggcgatggacccgtgctgcttccagataatcactatttgagtacacagagcgccctgagcaaggatcctaatgagaaaagggaccatatggtcttgttggagtttgtgactgcggccgggattactcttggaatggatgagttgtacaaaagaagccgcgacatctcgcacgggttcccacccgcagtggcggcccaggacgatggcactttgcctatgtcttgtgcccaggaatccggaatggataggcatccagccgcatgtgctagcgccaggataaacgtataa

SEQ ID NO: 203 - DNA, 855 bp, Artificial Sequence
  Modified Open Reading Frame
atggttagtaagggagaggaattgtttactggtgttgttccgatcttggtcgagctggacggcgacgtgaatggccataaatttagtgtgtctggagagggagaaggcgacgccacctacggcaaacttacactaaaatttatctgcacgaccggaaagttgcctgtaccatggcctacccttgtgactacactgacatacggcgtccaatgtttcagtcgctacccggatcacatgaaacaacacgacttcttcaaatccgcaatgcctgaagggtacgtgcaagaacgaacaatattcttcaaagacgatggaaattataaaacccgtgcggaggtgaaattcgagggagacacactggtgaataggattgagctaaagggcatagactttaaggaggacgggaatatactaggccataaattagagtacaactataattcacataatgtctacataatggctgataagcaaaagaatggtatcaaagttaacttcaaaatccggcacaacatagaggatggatccgtgcaactggccgatcattatcaacagaacactcctatcggtgacgggcccgtgctcctgcctgataatcactatctgtctacccaatctgccttatccaaggaccctaacgagaaacgggaccacatggtcctattggaatttgtaacggcagctgggattacactgggcatggatgagctgtataaaagaagccgtgacataagccatggattcccacctgcagtggctgcacaggacgacggaaccttacctatgtcatgtgcgcaggagtcaggcatggacaggcaccctgccgcgtgtgcgagcgctaggataaacgtgtaa

SEQ ID NO: 204 - DNA, 855 bp, Artificial Sequence
  Modified Open Reading Frame
atggtcagtaagggtgaagaactctttacaggtgttgttccaatattggtcgagcttgacggagacgttaatggacataagttcagcgtgtctggcgaaggcgagggcgatgctacgtatgggaagcttactttaaagttcatctgcacaacaggcaagcttccagtgccttggcccactctggttactacgctcacatatggcgtccagtgtttcagccggtatcccgaccacatgaaacagcatgatttcttcaagagtgcaatgccagaaggatatgtccaggaaagaacgatcttcttcaaggatgatggcaattacaagacaagggcggaggtcaaattcgaaggagacacactggtgaatcggattgaattaaagggtattgactttaaggaggacgggaatatcttgggtcataagcttgaatataattataattcacacaacgtatacatcatggcggacaagcaaaagaatggaataaaggtaaacttcaaaatccggcacaatatcgaggacggctcagtacagctcgcagaccactaccagcagaacactccaataggcgacggcccagtcttacttcctgataaccattatctgtctactcagtccgcgctgtccaaagatccaaatgagaaacgggaccacatggtacttcttgaatttgtcactgctgcgggcataacgcttggaatggacgaactgtataagcgtagtcgagatatatcacatgggttcccgccagcagtggcagctcaggacgatggaaccttgcccatgtcgtgcgcgcaagaatcagggatggacaggcaccctgcagcatgcgcttccgccaggatcaatgtttaa

SEQ ID NO: 205 - DNA, 855 bp, Artificial Sequence
  Modified Open Reading Frame
atggtatcgaaaggcgaagagttgtttacaggcgttgtgcctatcctggtggagctcgatggagacgtaaatggtcacaaattctcagtatcaggagagggcgaaggcgatgctacatacggcaagctgacgttaaaattcatctgtacgacaggcaaattgccagttccgtggccgactctagtcactaccctgacatacggcgttcagtgcttctcccggtacccagaccatatgaagcaacacgacttcttcaaatcagcaatgccggaaggatacgttcaggagcgtaccatattcttcaaggacgacgggaactataagactcgggctgaagtcaaattcgagggcgacacactggtaaataggattgaactcaaagggatcgatttcaaggaggacggaaatattctcggacataagctagaatacaattacaatagccacaacgtatatataatggccgacaagcagaagaatggtataaaggtaaatttcaaaatcagacacaatatagaagatgggagtgtccagctggcggaccactatcaacaaaacactccaatcggagatggaccagtcttacttccggacaatcactacctgtcaacgcagtccgctttgtcgaaggacccaaatgagaaacgcgaccatatggtgctgctagaattcgttaccgctgcaggcatcactctgggaatggacgaactctacaagaggtctagggacatctctcatgggttcccgccagctgtcgccgctcaggatgatggcactctgcccatgtcctgcgcacaagaaagtggtatggacaggcatcccgcagcctgtgcttcggctcgtatcaacgtctaa

SEQ ID NO: 206 - DNA, 855 bp, Artificial Sequence
  Modified Open Reading Frame
atggtatcgaagggagaggaactcttcactggcgttgtacctattctcgtggagctggatggcgacgtaaacgggcataagttcagcgtgtctggcgaaggtgagggcgatgcaacatatggcaagcttacacttaagtttatttgtacaaccggaaaactccctgtcccatggcccaccctagtgacaacgcttacatatggcgtccagtgcttcagtcgatatcctgatcatatgaaacaacacgacttcttcaagagcgccatgccggagggctatgtccaggaacggaccatattcttcaaggatgatggaaattacaaaacaagagccgaggtcaagttcgagggcgacacactcgtgaacagaatcgaattgaagggaatcgactttaaagaggatggaaacatactgggtcacaagctcgagtataactacaatagccataacgtttacataatggctgataaacagaagaatggaatcaaagtgaacttcaagatccggcataatatcgaggatggatctgttcagctggctgaccactaccaacagaacacacccatcggtgatgggcctgtgctcctgcccgacaatcactacttaagcactcagtccgctctgagcaaagatcccaatgagaagagagaccatatggttctgctggaatttgtaactgcagcaggcattacgctcgggatggacgagctttacaagcgttcccgggacatatcgcatggtttccctcccgccgtggctgcccaggacgacgggactttgcctatgagctgtgcacaggaaagtggcatggacagacatccagctgcctgcgcctctgccagaataaacgtttaa

SEQ ID NO: 207 - DNA, 855 bp, Artificial Sequence
  Modified Open Reading Frame
atggttagtaagggagaagagttattcaccggagtggtacccattctggtggaactagatggcgacgttaacggccataagttctcagtgtccggtgagggcgaaggagatgccacctatggtaaactaacgctaaaatttatttgcactaccggtaaattaccggtaccgtggcctacgttggtgacaacactgacgtatggcgtacaatgcttcagccggtatcctgaccatatgaagcagcacgacttcttcaagtccgcgatgcctgaaggatatgtgcaagagagaacgatcttcttcaaggacgacggaaactacaagacgcgtgccgaagtaaaattcgaaggagacaccctggtcaacaggatagagcttaaaggcatagacttcaaagaggatggtaatatccttggccacaagctcgagtacaactacaacagccataatgtatatattatggctgacaaacaaaagaatggtattaaggtaaatttcaagattcgacacaacatcgaggacggtagtgttcagctggctgaccactaccaacagaacacgcccattggcgatggacctgtgttgcttccggataaccattatttaagcacgcagtctgccctttctaaggatcccaatgagaaaagggatcacatggtacttctagagttcgtcacagccgcgggcataaccctcggcatggatgagttatacaagagatcacgggatatctctcacggattcccgccagcagtagcagcccaggatgatggtacactacctatgtcgtgtgcccaagagtccggcatggacaggcatcctgcagcttgcgcttccgctagaataaatgtataa

SEQ ID NO: 208 - DNA, 855 bp, Artificial Sequence
  Modified Open Reading Frame
atggtgagcaagggcgaagaactgttcacgggcgttgtgccgatccttgtcgaattagacggtgatgttaacggccataaattctcagtgtccggcgagggagagggcgacgcaacctacggtaaactgaccttaaagtttatatgtactactggaaaactcccggtgccatggcctaccttggtgaccacactgacttacggtgtgcaatgtttctcgagataccctgatcacatgaaacagcacgacttcttcaaatctgccatgcccgaagggtatgtgcaggaacgtacaatattctttaaagacgacggcaactacaaaaccagagctgaagtcaagtttgaaggtgacactcttgtcaaccggatcgagctcaaagggatcgatttcaaagaagacggtaatattctaggacacaaactagagtataactacaatagtcataatgtatacatcatggcggataagcaaaagaatggcattaaggtgaatttcaagattcgacacaacatcgaagatggatccgtgcaacttgcggatcattatcagcaaaacacgcccattggtgatgggcccgtattgttaccagataaccattatctgtcaacgcaaagcgctttaagcaaggatcctaacgagaagagggatcatatggtattattggagtttgtcactgcagcaggcattacgctcgggatggacgagctgtacaaacgcagcagggacattagtcacggctttcctcccgctgttgcagcgcaggacgacggaacacttcctatgagttgtgcacaagagtcagggatggacagacacccagcagcatgtgcgagcgctaggattaacgtgtaa

SEQ ID NO: 209 - DNA, 855 bp, Artificial Sequence
  Modified Open Reading Frame
atggtgtcgaaaggagaggaattatttactggcgtcgtgcctatcttggtagagctcgacggcgacgtgaatggacacaaattctccgtgtccggcgagggagaaggcgatgccacgtatggcaagctgaccctcaagttcatatgtacaaccgggaagttgccagtgccgtggccgaccctggtcacaacactcacgtacggagtgcagtgcttcagtcggtatcccgatcacatgaagcaacacgacttctttaagtccgcaatgcctgaaggctatgtgcaggaacgcactatattctttaaagacgacggcaattataagacgcgcgccgaggtgaaattcgagggtgatacactcgtgaatcgtattgagcttaaaggtatagactttaaggaggatggaaacatcctcggacataagcttgagtacaactataacagccacaatgtatacatcatggcagacaaacaaaagaatggtatcaaggtaaactttaagatacgacataatatcgaggacggctccgtccaactagcagatcattaccaacagaacacgcccatcggtgatgggcctgtgcttctgcccgataaccattacctgtcaacacagagcgctctgtcaaaggatcccaacgagaagagagaccatatggtcctcttggagttcgttaccgcggcaggaatcactctgggtatggacgaactatataagcgaagcagagatatatctcatggcttccctccggcagtggcagcacaggacgatgggacgcttcctatgtcctgcgcacaggaaagcggaatggaccgtcatccggccgcttgcgcaagcgcccggatcaatgtctaa

SEQ ID NO: 210 - DNA, 855 bp, Artificial Sequence
  Modified Open Reading Frame
atggtgtcaaagggtgaggaactcttcactggagttgtccctatcctagttgaacttgatggcgacgttaacggtcacaagttcagcgtttccggagaaggcgaaggagatgcaacctacggaaaattaacactgaaatttatatgcactacagggaagttgccagtgccctggccgacattagtgacaacactaacctatggtgtgcaatgcttcagcagatatcccgatcatatgaagcagcatgatttctttaaatcagcgatgccggaaggctatgtgcaagaacggaccatcttcttcaaagacgatggaaattacaagacgagagcggaggttaaattcgagggtgacaccctcgtgaacaggatcgaacttaagggtattgactttaaggaggatggcaacattctgggacacaagttagagtataactacaactctcacaatgtgtatataatggctgataagcaaaagaacgggattaaggtgaacttcaagattcgccataacattgaagacgggtccgtacaactagccgatcactatcaacagaacactccgatcggagacgggcccgtcctgctacctgacaatcattacctgtctacacagtcggcgctttctaaggatccgaatgagaaacgcgaccacatggttcttcttgaatttgtgacagccgcaggtataactcttggtatggacgaactgtataagagaagcagagatatatctcacggcttccctcctgcagtggcggcacaggatgacgggacattgccgatgagctgcgctcaggaatccggcatggataggcatcccgccgcatgtgcctcagcacgaattaacgtataa

SEQ ID NO: 211 - DNA, 855 bp, Artificial Sequence
  Modified Open Reading Frame
atggtttcaaaaggagaggagttatttaccggcgttgttcccattctagtcgagctggatggagatgtcaacggtcataagttctctgttagcggagaaggcgaaggtgacgctacatacggcaagttaaccttgaagtttatttgtaccactggcaagttgccggtgccctggcccactctcgtaactaccctcacatatggtgtgcaatgcttctcccgttaccctgaccacatgaagcagcatgatttctttaaatctgctatgccggaaggctatgttcaagagagaaccatcttcttcaaggatgatggcaattataagacacgcgctgaggtgaagtttgaaggcgacaccttagtgaatcggatcgagctcaagggcattgatttcaaagaagacggaaatattctaggccataaactagaatacaactacaattcgcacaatgtatacatcatggcggataaacagaagaacggaattaaagtgaatttcaaaattagacataacatcgaagatgggtcggtacagctggccgatcactatcaacagaacactccgatcggagacggaccagtactgctgccagacaatcattatctttctacgcagtcggctttgtctaaagatcccaatgagaagcgagaccatatggttctgcttgaattcgtcactgcagcaggaattactctgggaatggatgaactctacaagcggtcacgggatatctcccacggattcccaccggcagttgctgctcaagatgacggaactcttcctatgagttgcgcacaagagtccggaatggaccgccacccagccgcatgtgcgagcgctagaattaatgtctaa

SEQ ID NO: 212 - DNA, 855 bp, Artificial Sequence
  Modified Open Reading Frame
atggttagtaaaggtgaagagctcttcaccggcgtcgttccaatactcgtggagttagacggcgatgtgaacggacataagttctccgtgagtggcgaaggtgaaggagacgctacttatgggaagcttaccttgaaattcatttgtactacaggaaagctgccagtaccgtggcccacgctggttacgacactaacatatggcgtgcagtgtttctcgcgctatccagatcacatgaaacagcacgatttcttcaaatccgccatgcccgagggctatgtgcaggagcgtactatcttctttaaagatgatggtaactacaagacccgagcagaggtcaagtttgagggagatactctcgttaaccgcatagagttaaagggtatcgacttcaaggaagacggcaatatactcggccataagctcgagtataattacaatagtcacaatgtatacattatggccgacaagcaaaagaacggcataaaagtaaactttaaaattcgacataatatcgaggacgggtcagtacaactggccgatcattaccagcaaaatactcccattggtgatggtccagtactcctcccggacaatcactatttgtccacacaatccgctctctcgaaggatcccaacgagaagcgggaccacatggttcttctggagtttgttacggctgcagggattacgctcggcatggacgaactgtataagcgtagtcgggacatttcgcatggtttcccacccgccgtggctgcacaggacgacggcacccttccgatgtcttgtgcgcaggaaagcggcatggaccgacatccagccgcatgtgcctcagccaggataaatgtctaa

SEQ ID NO: 213 - DNA, 855 bp, Artificial Sequence
  Modified Open Reading Frame
atggtatcaaaaggagaagaattattcacgggcgtcgtgccaatcctcgtagaattggatggagatgtcaatggacacaaattcagtgtgtccggcgagggtgaaggagacgccacttacggtaaactgactctaaagtttatctgtacaacaggtaagctcccagtgccttggccgacactggtcactacactgacgtatggcgtgcagtgcttctcacgctaccctgatcatatgaagcagcatgacttcttcaaatcagctatgcccgaaggatatgtccaggaacggacgatattcttcaaggatgacgggaactacaaaacccgcgccgaggtcaaatttgagggagacactctggtgaatcgtattgaacttaagggcatcgacttcaaagaggacgggaatattcttggccataaattagagtacaattacaactctcacaatgtttacataatggctgacaagcaaaagaacggaattaaggttaactttaaaatccgtcataatatagaggatggatctgtccagttagctgatcattatcagcagaatacgccaataggcgacgggccagttctattaccagataaccactatcttagtactcagtccgcactgagtaaggaccctaacgagaaaagggatcacatggtgttgctggaattcgtgaccgccgccggaataactcttgggatggacgagctctataaacggagccgggatatcagccatggcttcccaccagctgttgccgcacaagatgatgggacactcccaatgagctgcgcgcaggagagcgggatggataggcatccggcagcatgcgcttccgccagaatcaacgtgtaa

SEQ ID NO: 214 - DNA, 855 bp, Artificial Sequence
  Modified Open Reading Frame
atggtatctaagggagaagaattgtttacgggtgtggtgccaattctggttgaactggatggcgatgtcaacggacataaattctctgtgtcaggagagggcgagggtgacgctacctacgggaagctaacattgaagtttatctgcactaccggcaagctgccggtgccatggccgaccctcgtgaccacgcttacatatggcgttcagtgcttctcaaggtacccggaccatatgaaacagcatgatttcttcaaatccgccatgcctgaagggtatgtgcaggaacggacaatattctttaaggatgatggaaactataagacccgggccgaagtcaaatttgagggagatactttggtcaacaggattgaactgaagggcattgatttcaaggaggatgggaacatactcggtcacaaactagagtataactacaattctcacaacgtgtacatcatggctgataagcagaagaatggcataaaggtcaacttcaaaattcggcataatattgaagacggtagtgttcagcttgctgatcactaccagcagaacacgcctataggcgacggtccggttctcttgccggacaatcattatcttagcactcaatcagcattgagtaaggacccgaacgagaaacgagaccacatggtcctgttggagttcgttacagctgctgggattacactcgggatggatgagttgtacaagcgatcgagagacatctcgcacggattcccgccagccgttgcggcgcaggacgatggcactttgccaatgtcgtgcgcacaggagagtgggatggatcgccatcccgctgcctgtgcgtcagctaggattaatgtctaa

SEQ ID NO: 215 - DNA, 855 bp, Artificial Sequence
  Modified Open Reading Frame
atggtgtctaaaggagaagaactgttcacaggagtagtacctatcctggtggagctggacggcgacgtcaatgggcacaagttcagcgtttccggcgagggagaaggcgacgcaacctacggaaaattaacgctgaagtttatatgtaccacagggaaactcccggtaccttggccgactctggtaaccaccctaacttacggtgtacaatgtttctcccgctatcccgatcacatgaagcaacatgatttcttcaagtctgcaatgccggagggatacgtacaggagcgcactatattcttcaaggacgacggaaactataaaactcgagccgaagtgaaattcgagggtgacaccctcgttaaccgaattgagcttaagggcatcgatttcaaggaagacgggaatatcctgggacataaactcgagtacaactataacagtcataatgtatacattatggctgacaaacagaagaatggcattaaggtgaactttaaaatacgacacaatatagaggatggcagtgtgcaactggctgaccattaccaacagaacactcctattggtgatggccctgttctactgccggataaccactacctgagcactcaatccgcattgagcaaggaccctaacgaaaagagggatcacatggtcctcctggaatttgtcaccgccgcgggtattactttaggaatggatgaactctataagcgctctagagacatttcgcacggatttccacccgctgtggctgcacaggacgacgggacactgccgatgtcatgcgcgcaggagtcgggaatggatcgccaccctgccgcttgtgcatcggctcgaattaatgtgtaa

SEQ ID NO: 216 - DNA, 855 bp, Artificial Sequence
  Modified Open Reading Frame
atggtctccaaaggagaggagctgttcacaggcgtcgtgcccatcttagtggaactggatggcgacgttaatggacacaaattcagtgtttctggtgagggtgagggagacgcaacttacgggaagctgactttaaaattcatctgtacgacaggtaaactgcctgtcccatggcctacactggtcacgaccctaacctatggagtgcagtgcttcagccgttaccctgatcatatgaagcagcacgatttctttaagtctgccatgcccgagggatatgtccaggagcgaactatcttctttaaagacgatggtaactacaagactagggctgaggtgaagtttgagggcgatactttagtaaatcgcatcgagctcaagggaattgacttcaaagaagacggcaatatccttggtcacaagctagaatacaactacaattcacacaacgtttacatcatggccgataaacagaagaacggtattaaggtcaatttcaagatccggcataatatcgaggacggtagtgttcaactcgctgatcactaccagcagaacacgcctatcggcgatgggccagttctgctacctgataaccactatctaagcacccagagtgctttaagcaaagatccgaatgagaagcgggatcatatggtcctgctggagttcgtcacagccgcgggaattacgctaggtatggacgagctatataaacgatccagagacataagccatgggttcccgcctgcggtcgcggcccaggacgatggtactctccctatgtcatgcgcacaggagtctggcatggacagacatcccgcagcttgcgcctccgctcgaataaacgtgtaa

SEQ ID NO: 217 - DNA, 855 bp, Artificial Sequence
  Modified Open Reading Frame
atggtttccaagggagaagaactcttcactggtgtggtaccaattctggtggaattggatggtgatgtgaatggccacaaattctcagtttcgggagagggagagggtgatgccacctatgggaagctgacactgaaattcatttgcaccacaggcaagctgccagtgccctggcccaccttagtgaccaccctgacctatggtgttcaatgtttctcgcgctatccagaccacatgaagcagcatgatttcttcaagagtgccatgccggagggctatgttcaggaacggaccatcttcttcaaggatgatgggaattacaagacccgtgcagaggtcaaatttgaaggtgacacactggtgaaccggatagaactgaagggcatagatttcaaagaagatgggaatatactgggacacaaactggaatacaattacaattcacacaatgtttacataatggcagacaaacagaagaatgggataaaggtaaatttcaagatccggcacaacatagaggatggatctgtacaattagcagatcattatcagcaaaacacgcccataggagatgggccagtgctccttccagacaatcactacctgtccacccagagtgccctctccaaggacccgaatgagaagcgagatcacatggtgctgctggaatttgtgacagctgcaggaataacactgggaatggatgaattatacaagcgatcacgtgacatttcccatggatttccaccagcagtagcagcccaggatgatggaacactgcccatgtcctgtgcccaagaatcgggaatggacagacatccagcagcctgtgcctcagccaggataaatgtttaa

SEQ ID NO: 218 - DNA, 855 bp, Artificial Sequence
  Modified Open Reading Frame
atggtgagcaagggagaagaactgttcactggtgtggttccgattctggtggagctggatggagatgtgaatggccacaaattcagtgtgtctggcgagggcgaaggagatgccacatatgggaaactaaccctgaaattcatttgcaccacaggaaaactgcctgtaccctggcccacactggtgaccaccttgacctatggagtgcaatgcttctcccgatacccagatcacatgaagcaacatgatttcttcaaatcggccatgcctgagggatatgttcaggagcggaccatcttcttcaaagatgatgggaattacaaaacacgagcagaagtgaaatttgagggtgacacgctggtaaaccgcatagaactgaaaggaattgatttcaaagaagatgggaacatcctgggacacaaactggaatacaactacaattcgcacaatgtttacatcatggctgacaagcagaagaatgggataaaggtgaatttcaagatacggcacaacatagaggatggatctgttcagctggcagaccattaccagcagaacacgcccataggtgatgggccggtacttctgccagacaatcattatctgagcacacaatctgccctctccaaggatcccaatgagaaacgtgaccacatggtactcctggaatttgtgacagcagctggaatcaccctaggaatggatgagctttacaagcgatcccgtgacatttcccatggatttccgcctgcagtagcagcccaagatgatgggaccctacccatgtcctgtgcccaggagagtgggatggaccggcacccggctgcatgtgcctctgcacgaataaatgtctaa

SEQ ID NO: 219 - DNA, 855 bp, Artificial Sequence
  Modified Open Reading Frame
atggtttcaaagggtgaagagctcttcacaggtgtggtgcccatactagtggaattggatggagatgtcaatggccacaaattctcggtgagtggtgaaggagaaggtgatgccacctatgggaaactgaccctgaaattcatttgcaccactgggaaattgccggttccatggcccaccttggtgaccacgctgacctatggagtgcaatgcttctcccgatatccagaccatatgaaacagcatgatttcttcaaatcggccatgcctgagggatatgtgcaagaacgaacgatcttcttcaaagatgatggaaactacaagacccgtgcagaggtgaaatttgaaggagacaccctggtgaatcggatagaactcaaagggatagatttcaaagaggatgggaatatcctgggacacaaattagaatacaactacaattcacacaatgtgtacatcatggcagacaagcagaagaatggaataaaggtgaatttcaagattcggcacaacatagaagatggatcagttcagctggctgatcattatcagcaaaacacacccataggagatgggccggtccttctgcctgacaatcattacctgtccacccagagtgccctttccaaggatccgaatgagaagcgggatcacatggtactactggagtttgtgacagcggcaggcatcacactgggcatggatgagctgtacaagaggagccgtgacatttcacatggatttccaccggcagtggcagcacaggatgatgggaccttacccatgtcctgtgcccaagaatcagggatggaccgccatcctgcggcctgtgcctcagcccggatcaatgtgtaa

SEQ ID NO: 220 - DNA, 855 bp, Artificial Sequence
  Modified Open Reading Frame
atggtttccaagggagaagagctgttcacgggcgtggtgccgatcttggtggaattggatggagatgtgaacggccacaaattctcggtgagtggtgaaggtgagggtgatgccacctatggaaagctgacactgaaattcatttgcaccactggaaaactgccggtgccctggcccacattggtgaccaccctgacatatggagtacaatgcttctcccggtacccagatcacatgaagcaacatgatttcttcaagagtgccatgccagaaggatatgtgcaggaacgaactatcttcttcaaagatgatgggaactacaagacccgtgcagaggtgaaatttgaaggtgacacactggtaaatcggatagagctgaaagggatagacttcaaagaagatggaaacatactgggccacaagctggaatacaactacaattcacacaatgtttacataatggcagacaaacagaagaatgggataaaggtgaatttcaaaatacgccacaacatagaagatggatctgttcagctggctgatcattatcagcagaacacacccattggcgatggccctgttctgctgcctgacaatcattacctctccacacaatcagcgctgtccaaggatcccaatgagaagagagatcacatggtgctgctggaatttgtgacagcagctggaatcaccttgggaatggatgaactctacaaacgctcccgtgacatttcacacggatttccaccagctgtggcagcccaagatgatggaacccttcccatgagctgtgcccaggaatctgggatggaccgacacccagctgcctgtgcctcggcacggatcaatgtgtaa

SEQ ID NO: 221 - DNA, 855 bp, Artificial Sequence
  Modified Open Reading Frame
atggtgtcgaaaggagaagagctgttcacaggagtggttcccatcctagtggaactggatggagatgtgaatgggcacaaattctcggtttcgggagaaggtgagggtgatgccacctatgggaagctgaccctgaaattcatttgcaccacaggaaaacttcctgtgccatggcccacactggtgaccacactcacctatggagttcaatgcttctcccgataccctgatcacatgaagcaacatgatttcttcaagtctgcgatgcctgagggatatgttcaggagcggacgatcttcttcaaggatgatgggaattacaagaccagagcagaggtgaaattcgaaggagacacattggtgaatcgcattgagttgaaaggcatagacttcaaagaggatgggaatatactaggccacaaactagaatacaattacaattcacacaatgtgtacatcatggctgacaagcagaagaatggaataaaagtgaatttcaagattcgccacaacatagaggatggatcggtgcagctagctgatcattaccagcagaacacacccataggagatggcccagtgctgctgccagataatcactatctttccacccaatcggccctgagcaaggatcccaatgagaagcgagaccacatggtcctcctagaattcgtgactgctgctggaatcacactaggaatggatgagctgtacaagagatcccgagacatttcccatggatttccacctgcagtggctgcccaggatgatgggaccctgcccatgtcatgtgcacaggaatcagggatggatcgacaccctgcagcatgtgcctcagccaggatcaatgtttaa

SEQ ID NO: 222 - DNA, 855 bp, Artificial Sequence
  Modified Open Reading Frame
atggtgtccaaaggagaggaactattcactggagtggtgcccattctggtggagctggatggtgatgtgaatgggcacaaattctctgtttcaggtgaaggagaaggagatgccacctatggcaagctaaccttgaaattcatctgcaccacagggaaattaccggtaccctggcccaccctggtgacgaccctcacctatggagtgcaatgcttctcccgctatcctgaccacatgaaacaacatgatttcttcaaatcggccatgcctgagggatatgtgcaagagaggaccatcttcttcaaagatgatggaaattacaagacccgtgctgaagtgaagtttgagggtgacacactggtgaaccgcatagaattgaagggaatagacttcaaggaggatggcaacattctagggcacaaactggaatacaattataattcccacaatgtttacatcatggctgacaagcagaagaatgggatcaaagtgaatttcaaaatacggcacaacatagaggatggatcggtgcagttggcagatcattaccaacagaacacgccgataggtgatggaccagtgctgcttccagacaatcattatctgagcacacagagtgccctgtccaaagatccaaatgaaaagcgtgatcacatggtgctgctggaatttgtgacagctgccggcataacgctgggcatggatgaattgtacaagcggagccgagacatttcccatggctttcctcctgctgtggcagcccaggatgatgggaccttgcccatgagctgtgcgcaagagtctggaatggaccgacaccctgctgcctgtgccagtgcacgaatcaatgtttaa

SEQ ID NO: 223 - DNA, 855 bp, Artificial Sequence
  Modified Open Reading Frame
atggtttccaagggtgaggagctgttcactggtgtggtgcccatactggtggaattggatggtgatgtaaatggccacaaattctctgtttctggagagggtgagggtgatgccacatatgggaaactgaccctcaaattcatctgcacgacaggaaaattaccagtaccatggcccaccctggtcaccaccctcacctatggagtgcaatgcttctcccggtatcctgatcacatgaaacagcatgatttcttcaaatcggccatgccagaaggatatgtacaagaacggacgatcttcttcaaggacgatggaaactacaaaacacgggctgaggtgaaatttgagggagacacgctggtgaaccgaatagagctcaaagggatagatttcaaagaagatgggaacatcttgggacataagctggaatacaattataattcacacaatgtctacataatggctgacaaacagaagaatggcatcaaggtgaatttcaagatacgccacaacatagaggatgggtcggttcagctggctgatcattaccagcagaacacacccataggagatgggcctgtactgctacctgacaaccattacctttccacacagagtgccctttccaaggacccaaatgagaaacgagaccacatggtactcctggaatttgtgacagctgctggaatcaccctgggaatggatgaactgtacaagagatcacgagacatctcccatggatttccaccagctgtggcagcccaggatgatggcacacttcccatgtcctgtgcacaagaatctggtatggatcgccacccagctgcatgtgcctcagcccggataaatgtgtaa

SEQ ID NO: 224 - DNA, 855 bp, Artificial Sequence
  Modified Open Reading Frame
atggtgtccaagggtgaagagctgttcacaggagtggttcccattctagtggagctggatggtgatgtgaatggccacaaattctctgtgagtggtgaaggtgagggagatgcaacctacggaaaactaaccctgaaattcatttgcaccacagggaagctgccagtaccatggcccaccttggtgaccaccttgacctatggtgtacaatgcttctcacgatatccagaccacatgaagcagcatgatttcttcaagagcgccatgcctgaaggatatgtacaagagcggaccatattcttcaaagatgatgggaattacaagacacgtgctgaggtgaaatttgagggtgacaccctggtcaatcggatagagttgaagggcatagacttcaaagaggatgggaacatcttgggccacaaactagaatacaactacaacagccacaatgtgtacatcatggcggacaaacagaagaatgggataaaggtcaatttcaagatacgccacaacatagaggatggttcagtgcaattggcagaccattatcagcagaacacaccgataggtgatgggccagtgctgctgcctgacaatcattatctttccacgcaatcggcactgtccaaggatcccaatgagaaacgagatcacatggtgctgctggaatttgttactgcagctgggataacattgggaatggatgagctgtacaagaggagccgtgacatttcccatggatttccgcctgctgtggcggcacaggatgatggcacgctaccgatgtcatgtgcccaagagagtggaatggaccggcaccctgctgcctgtgcctctgccaggatcaatgtttaa

SEQ ID NO: 225 - DNA, 855 bp, Artificial Sequence
  Modified Open Reading Frame
atggtgagcaagggagaggaactgttcacgggtgtggtaccaattctggtggagctggatggtgatgtgaatggccacaaattcagtgtgagtggagaaggagaaggtgatgccacatatgggaagctgaccctgaaattcatctgcacgactgggaaactgcccgtgccctggcccaccctggtgacgaccctgacctatggtgttcaatgctttagccgatatcctgaccacatgaagcagcatgatttcttcaagagtgccatgcctgaaggctatgtgcaggaacggaccatcttcttcaaggatgatgggaactacaagacccgtgctgaggtgaaatttgaaggagacacactggtgaatcggatagaactgaaagggatagacttcaaagaagatggaaacatcctgggacacaaactggaatacaactacaattcgcacaatgtttacataatggcagacaaacagaagaatggaatcaaggtgaatttcaagattcgccacaacatagaggatggatcggtacaacttgctgatcattatcagcagaacacaccgataggtgatggccctgtactgctgcctgacaaccattatctttccacccaatccgccctgtccaaagatcccaatgagaagagagaccacatggttctgctggagtttgtgactgctgcgggaataactttagggatggatgagctctacaagagatcccgtgacatatcccatggatttccgccagcagtggcagcacaggatgatgggaccctacccatgtcctgtgcccaggaatctggaatggaccggcaccctgctgcctgcgcctcagccaggatcaatgtctaa

SEQ ID NO: 226 - DNA, 855 bp, Artificial Sequence
  Modified Open Reading Frame
atggtgtccaaaggtgaagagctgttcacaggagtggtacccattctggtagagctggatggagatgtgaatgggcacaaattctcggtttctggagaaggagagggtgacgccacctatgggaagctcaccctaaaattcatatgcacaactggaaaactaccagtgccctggccgaccttagtgaccaccctgacatatggtgtgcaatgcttcagccgataccctgatcacatgaagcaacatgatttcttcaagagtgccatgccagagggatatgtacaggaacggaccatcttcttcaaagatgatgggaattacaagacacgtgctgaggtgaaatttgaaggagacaccctcgtgaatcggatagaactgaagggaattgacttcaaagaagatgggaacattctgggccacaaactggaatacaattacaattcccacaacgtgtacatcatggcagacaagcagaagaatggaataaaagtgaatttcaagattcgccacaacatagaggatggctctgtgcaattggcggatcattaccaacagaacacaccgataggtgatggtcctgttctgctacctgacaaccactacctctccacacaatcagcactgagcaaagatcccaatgagaaacgagaccacatggttctgctggaatttgtgacagctgctgggatcacactgggtatggatgaactatacaagagatcacgagacatttcgcatggctttccacctgctgtggctgcccaagatgatggaacactaccaatgtcctgtgcacaggaatctggaatggatcgccatccggcggcctgtgcatctgcccggataaatgtgtaa

SEQ ID NO: 227 - DNA, 855 bp, Artificial Sequence
  Modified Open Reading Frame
atggtatctaaaggcgaggagttgtttaccggcgtcgttcctattctcgtcgaactcgacggcgacgtaaacggtcacaagtttagcgttagcggcgaaggcgagggcgacgctacttacggcaagttaacattaaagtttatctgtacaaccggaaagttgcccgtgccttggcctacgttagttacaactcttacttacggcgttcaatgtttctctaggtacccagaccatatgaaacagcacgacttctttaagagcgcaatgcccgagggctacgtccaggaacgtactatcttctttaaagacgacggtaactacaaaacaagggccgaagttaagttcgaaggcgatactctcgttaatagaatcgagcttaaaggtatcgactttaaggaggacggtaatatactcggccataagctggagtataactataatagccataacgtctatattatggccgataaacaaaagaacggtattaaagttaactttaaaattaggcataatattgaggacggttccgtccaactcgcagaccactaccagcaaaatactcctatcggtgacggtcccgtcctccttcccgataaccactatcttagtactcaatccgctttgtctaaagatcctaacgaaaagagggaccatatggtgttactcgagttcgttaccgccgccggtattactctcggcatggacgagttgtataaacggtctagggatatcagccacggtttccctcccgccgtcgccgcccaagacgacggtaccttacctatgagctgcgcccaggaaagcggtatggaccgtcaccctgccgcttgcgctagcgctagaattaacgtctaa

SEQ ID NO: 228 - DNA, 855 bp, Artificial Sequence
  Modified Open Reading Frame
atggtatctaagggagaggaactatttaccggcgtcgtccctatcctcgtcgagctcgatggcgatgttaacggtcacaagtttagcgttagtggcgaaggtgagggcgacgctacgtatggtaagcttactcttaagtttatctgtactaccggtaagttgcccgtcccttggcctactctcgttactacccttacttacggcgtacagtgtttctctaggtatccggatcatatgaagcaacacgacttctttaaaagcgctatgcccgagggttacgtacaagaacggactatattctttaaagacgacggcaattataaaactagagccgaggttaagttcgagggcgacaccctcgttaataggatcgagcttaagggaatcgacttcaaggaggacggtaatatacttggtcataagctcgagtataactataatagccataatgtgtatattatggccgataagcagaagaacggtattaaggttaactttaagattaggcataatattgaagacggttccgtccagctcgccgaccactaccagcagaatactcctatcggcgatggtcccgtcttgctgccggataatcactaccttagtactcaaagtgctttaagtaaagacccgaacgaaaagcgcgaccatatggtcctccttgagttcgttacagccgccggtattactctcggtatggacgaattatataaacggtctagggatattagtcacggtttccctccagccgtcgccgctcaagacgacggtaccctccctatgtcttgcgcgcaagagtccggtatggataggcatcctgccgcttgcgctagcgcgcgtattaatgtgtaa

SEQ ID NO: 229 - DNA, 855 bp, Artificial Sequence
  Modified Open Reading Frame
atggtgtctaaaggcgaagagctgtttaccggcgtcgtcccaatccttgtcgaactcgacggcgacgttaacgggcacaagtttagcgtctccggcgagggcgaaggcgacgctacttacggaaagcttactcttaagtttatttgtactaccggtaagttaccagtgccatggccaactttagtcactactcttacatacggcgtgcaatgtttctctaggtatcccgaccatatgaaacagcacgacttctttaagtccgctatgcccgaaggttacgtccaggaacgtactatcttctttaaggacgacggtaactataaaactagggccgaggttaagttcgaaggcgatactctcgttaataggatcgagctaaaaggtatcgactttaaggaggacggtaatatccttggtcataaattggagtataactacaacagtcataacgtgtatattatggccgataagcaaaagaatggtattaaagttaacttcaaaattaggcataacatcgaggacggtagcgtccagttggccgaccactaccagcagaatactcctatcggcgatggtcccgtcctcttacccgacaaccattacctgtctactcaaagcgcattatctaaggaccctaacgaaaagcgcgaccatatggtattactcgagtttgttaccgccgccggtattactctcggcatggacgagttatataagcgttctcgcgatattagtcacggctttcctcccgccgtggccgctcaagacgacggtactttgcctatgtcttgcgctcaagagtccggtatggatcgtcaccctgccgcgtgcgcgtcggcccgcattaacgtctaa

SEQ ID NO: 230 - DNA, 855 bp, Artificial Sequence
  Modified Open Reading Frame
atggttagtaaaggagaggagctatttaccggcgtcgtccctatcctcgtcgagctcgacggcgacgtcaacggacataagtttagcgttagcggcgagggcgaaggcgacgctacttacggtaaacttactctgaagtttatctgtactaccggtaagttgcccgttccttggcctacgctcgttactactttaacttacggcgttcagtgtttctcaaggtatcccgatcacatgaagcagcacgacttctttaaaagcgctatgcccgaaggttacgtacaggagcggactatcttctttaaagacgacggtaactataaaacccgcgccgaagttaagttcgagggcgacacgttagtcaaccgcatcgaacttaagggcatcgactttaaagaggacgggaatatccttggtcataaactcgagtataactataattctcataacgtgtatattatggcggataagcagaagaacggtataaaggttaactttaaaatccgtcataatatcgaagacggtagcgtacagcttgccgaccactatcagcagaatactcctatcggcgacgggccagtgctgctacccgataaccactatttatctactcaaagcgcgttgagtaaggatcctaacgagaaaagggaccatatggtgctcttagagtttgttaccgccgccggcattactttaggtatggacgaactatataagcgcagccgcgatattagtcacgggttccctcccgccgtcgccgcgcaggacgacggtactttgcctatgtcttgcgctcaggagtccggtatggatagacatcccgcagcttgcgctagcgctaggattaacgtataa

SEQ ID NO: 231 - DNA, 855 bp, Artificial Sequence
  Modified Open Reading Frame
atggttagtaaaggcgaagaattatttaccggcgtcgtgcctatactcgtcgaacttgacggcgacgttaacggtcataagtttagcgtatccggcgagggcgaaggcgacgctacttatggcaagcttactcttaagtttatatgtactacaggtaagctcccagtgccgtggcccactctcgttactactcttacgtacggcgttcagtgtttctcacgttatcccgaccatatgaagcagcacgacttctttaagtccgctatgcccgaaggttacgtccaggagcgcactatattctttaaagacgacgggaactataaaactagagccgaggtcaagttcgaaggcgatactctcgtgaatagaattgagttgaaaggtatcgactttaaagaagacggaaatatcctcggtcataaactcgagtataactataatagtcataacgtatatattatggccgataaacaaaagaacggtattaaggttaactttaaaattagacataatatcgaggacgggtccgtccaactcgccgatcactaccagcaaaatacacctatcggcgacggtcccgtgctcttgccagataatcactatttgtctacgcagtccgctttgtcaaaggatcctaacgagaaacgcgatcatatggtcctcctcgagttcgttacagccgccggcattactctcggcatggacgagttgtataaaaggtctagggatatctctcacggcttcccgcccgccgtagccgctcaggacgacggtactttacctatgagttgcgcccaagaaagcggtatggataggcatcccgccgcgtgcgctagtgctagaattaacgtttaa

SEQ ID NO: 232 - DNA, 855 bp, Artificial Sequence
  Modified Open Reading Frame
atggttagcaaaggcgaggagttatttaccggagtcgtccctatcctcgtcgaactcgacggcgacgttaacggtcataagttcagcgttagcggcgagggcgagggcgacgcaacgtacggtaagctcacattaaagtttatctgtacaaccggtaagttacccgtaccgtggccaactctcgttactactctcacttacggcgtccagtgtttcagtaggtacccggatcatatgaaacagcacgatttctttaaaagcgctatgcccgagggttacgtccaggagcgtactatcttctttaaagatgacggaaactataagacaagggccgaggttaagttcgaaggcgatactctcgttaatagaatcgagcttaagggcatcgactttaaagaagacggtaatatcctcggtcataagctagagtataactataatagccataacgtctatattatggctgataaacagaagaacggtattaaggttaacttcaaaattaggcataatatcgaagacggcagcgtccagctcgccgaccactaccaacaaaatacacctatcggcgacggtcccgtcttgttgcccgataatcactacttgtctactcaatccgcgttaagtaaggaccctaacgagaaacgcgaccatatggtattgttagagttcgttactgccgctggtattacgttgggcatggacgagttatataaaagaagtagggatattagtcacggctttcctcccgccgtcgccgctcaggacgacggcactttgcctatgtcttgcgctcaggaaagcggcatggacagacacccagccgcttgcgctagtgctaggattaacgtctaa

SEQ ID NO: 233 - DNA, 855 bp, Artificial Sequence
  Modified Open Reading Frame
atggtgtctaaaggcgaggagttgtttaccggcgtcgtgccaatactcgttgaactcgacggcgacgttaacggtcataagtttagcgtctccggcgaaggtgaaggcgacgctacttacggtaagctcactcttaagtttatctgtactacaggaaaactacccgtcccttggcctactctcgttacaactttaacgtacggcgtacagtgctttagcaggtatcccgaccatatgaaacaacacgacttctttaagtcagcgatgcccgaaggttacgtgcaggagcgtactatcttctttaaggacgacggtaactataaaactcgcgccgaagttaaattcgaaggtgatactttggttaatcgtatcgaacttaagggtattgactttaaggaggacggcaatatcctcggtcataagctcgaatataactataatagtcataacgtatatattatggccgataagcagaagaacggtattaaagttaactttaaaattagacataatatcgaggatggttccgtgcaactcgccgaccactaccagcagaatacgccgatcggcgacggtcccgtcctcttgccagataatcactacttgtctacgcaaagcgctttgtcgaaggaccctaatgaaaagagggatcatatggtgttactcgagttcgttaccgccgccggcattacactcggtatggacgagttgtataagcgttcacgcgatattagtcacggtttccctcccgccgtcgccgcccaggacgacgggactctgcctatgtcttgcgctcaagagtccggaatggaccgtcaccctgccgcttgcgctagcgctaggattaacgtctaa

SEQ ID NO: 234 - DNA, 855 bp, Artificial Sequence
  Modified Open Reading Frame
atggttagtaagggtgaagagttatttaccggcgtcgtgcctattctcgtcgagttggacggcgacgttaacggccataagttctccgtatccggcgagggcgagggcgacgctacttatggtaaacttactcttaagtttatatgtacaaccggtaagttgccagtcccttggcctacgttggttaccactcttacttacggcgttcagtgtttctctagatatccggatcatatgaagcaacacgacttctttaagagcgctatgcccgaaggctacgtccaagaacgtactatcttctttaaggacgacggtaactataagactagagccgaggtaaagttcgagggcgatactttagttaacaggatcgagcttaaaggaatcgactttaaagaggacggcaatatcctcggtcataagctcgagtataattataatagtcataacgtttatattatggccgataagcaaaagaatggcattaaagttaactttaagattaggcataatatcgaagacggttccgttcaactcgcagatcactatcagcaaaatactcctatcggcgacggcccggtgctgttgcccgataatcactatcttagcacccaaagcgctttgtctaaggatcctaacgagaagcgggatcatatggtactccttgagttcgttactgccgccggcattacgctgggtatggacgaactttacaaaaggtctcgcgacattagtcacgggttccctcccgccgtcgccgctcaggacgacggtacgttacctatgtcgtgcgcacaagaaagcggtatggataggcatcccgccgcgtgcgcttccgctaggattaacgtctaa

SEQ ID NO: 235 - DNA, 855 bp, Artificial Sequence
  Modified Open Reading Frame
atggtatctaaaggcgaggaactatttacgggcgttgtccctatcctcgttgagttagacggcgacgttaatggtcataagtttagtgttagcggcgaaggcgagggtgacgctacttacggtaagcttactctcaagtttatttgtactaccggcaagctgcccgtcccttggcctacactcgtcactactcttacttacggcgtccagtgctttagtaggtatcccgatcatatgaagcagcacgacttctttaagtccgctatgcccgaaggctacgtccaagagcgcactatcttctttaaggacgacggcaactataaaactcgcgcagaggttaagttcgaaggcgatactctcgttaataggatcgaacttaaaggtatcgactttaaagaggacggtaatattctcggtcataagttagagtataactacaatagtcataacgtgtatattatggccgataaacaaaagaacggtattaaagttaacttcaaaattagacataatattgaggacggttcagttcaactcgccgatcattaccagcagaatactcctatcggcgacgggcccgtgttattacccgataaccactacttgagtacccaaagtgcacttagtaaagaccctaacgagaaacgcgatcatatggtactcctcgaattcgttacagccgccggcattacgctcggtatggacgagctatataaacgttcgagggatatcagtcacggtttccctccagccgtcgccgcccaagacgacggtacgttgccaatgtcttgcgctcaggagtccggtatggaccgtcacccggccgcttgcgctagcgctaggatcaacgtataa

SEQ ID NO: 236 - DNA, 855 bp, Artificial Sequence
  Modified Open Reading Frame
atggtctctaagggtgaagagttatttaccggcgtcgtgccaatcttggtcgaactcgacggcgacgtcaacggtcataagtttagcgttagtggcgagggcgagggcgatgctacatacgggaagttaactcttaagtttatatgtactaccggaaagttgcccgtcccttggcctaccttggttactactcttacttatggcgtccagtgtttctctagatatcccgaccatatgaaacagcacgacttctttaagtccgctatgccagaaggttacgttcaagagcgtactatcttctttaaagacgacggtaactataaaactagggccgaagttaagttcgagggcgatacgctggttaataggatcgaacttaaaggcatcgactttaaggaagacggtaatatattgggccataagttagagtataattataatagccataacgtatatattatggcagataagcagaagaacggtattaaagttaatttcaaaattagacataatatcgaagacggcagcgttcagcttgccgaccattaccagcaaaatacgccgatcggagacggtcccgtacttcttcccgataatcactatttatctactcagtctgctctgtctaaggatcctaacgagaagcgcgaccatatggtattactcgagttcgttaccgccgccggaattactttgggcatggacgagctttataagcgtagtcgcgatattagtcacgggttccctcccgccgtcgccgcgcaggacgacggtactttacctatgagttgcgcgcaggagtccggtatggatagacacccggccgcttgcgctagcgctcgtatcaacgtataa

SEQ ID NO: 237 - DNA, 621 bp, Artificial Sequence
  Modified Open Reading Frame
atggcggtatatccgtacgacgtaccggactatgcgggatatccgtatgatgtccctgattacgccggctcctatccatacgacgtcccggattacgccgggtcaggtgtcttcactttggaggacttcgtcggtgactggaggcaaacagccgggtacaaccttgaccaggttctggaacagggaggcgtctcctccctgttccagaacctgggcgtctcagtgacgcctatccaaaggatcgtcctatcgggcgagaatggtcttaagatagatattcatgtgatcattccttacgagggcctatctggtgaccagatgggccaaatagagaaaatcttcaaggttgtgtacccggtggatgaccaccacttcaaggtcatcctgcactatggcaccctagtcatcgacggagtcactccaaatatgatcgattacttcgggcgtccctacgaagggatcgccgtcttcgatgggaagaagatcaccgtgaccgggacactctggaacggcaataagatcatagatgagcggttgatcaaccctgacgggtctttgctgttcagagtgaccataaacggcgtgaccgggtggcgtctatgtgaaaggatactggcgtaa

SEQ ID NO: 238 - DNA, 621 bp, Artificial Sequence
  Modified Open Reading Frame
atggctgtgtacccgtacgacgtaccagattacgccggttacccgtacgatgtgccggattacgccgggtcatatccgtacgatgtgccggactatgccggcagtggcgtcttcaccctcgaggacttcgtgggtgactggcgccaaactgccggctataacctggaccaggttctggaacagggaggtgtaagctccctgttccagaatttgggtgtgtccgtcacacccatccaacggatcgttctctccggagagaacggtctgaagattgacatccatgtcatcatcccgtacgaagggttatccggtgaccagatgggacagattgagaaaatcttcaaggtcgtctacccagtagacgaccatcatttcaaggttatccttcattacggcaccctagtaatcgatggcgtcacgccgaacatgatcgattactttgggcggccgtatgaagggatagccgtatttgatgggaagaaaatcacggtgaccggaaccctatggaacgggaacaagatcatcgacgaacgattgatcaacccggacgggtcactcctgttccgggtgacaattaacggcgtgacaggttggcgactctgcgagcggatactcgcctaa

SEQ ID NO: 239 - DNA, 621 bp, Artificial Sequence
  Modified Open Reading Frame
atggcggtgtatccatatgacgtcccggattacgcgggatacccgtacgatgtaccggactacgccgggtcgtatccctacgacgtcccagattatgccggcagtggcgtcttcacccttgaagactttgtgggtgactggcgccaaactgccggctataatctggaccaagttctggaacagggaggcgtttcctccctgttccagaacttgggcgtgtccgtgacgcccatacagcgaatcgtgctgtcgggcgagaacggcctaaagatcgatatccatgtaatcatcccatatgagggcctgagtggcgatcagatgggacaaatcgaaaagatattcaaagtggtgtatcccgtcgatgaccaccatttcaaagtgatattgcactatgggacgctggtcatcgacggagtgacaccaaacatgatcgattactttggccgtccctacgagggtatcgccgtgttcgacggtaagaagattaccgtcaccgggacattatggaatggcaataaaataattgatgagagactcatcaaccctgatgggtctctgctgttccgggtgactatcaacggagtcaccggatggaggctctgcgagcggatcctggcgtaa

SEQ ID NO: 240 - DNA, 621 bp, Artificial Sequence
  Modified Open Reading Frame
atggctgtctatccatacgacgtgccggactacgccggctatccgtatgatgtgccggactacgcgggcagttatccatatgacgtgcccgattacgccggatccggcgtattcacccttgaggatttcgtcggcgactggcgccagaccgctggatacaatctggaccaggttctggagcagggtggagtctcatccttgttccagaacctgggagtcagtgtgactcctatccagcggatcgtcttatcgggagaaaacggcctgaagatcgatatccacgtgataatcccttatgagggattatccggcgaccagatgggtcaaatcgagaagatcttcaaggtcgtctacccggtagacgatcaccatttcaaggtgattctgcactatggcacgttggtgatagacggtgtgacaccgaatatgatcgattacttcggtcgcccttacgagggcattgccgtgtttgacggtaagaagattaccgtcaccggcaccctctggaatgggaacaagatcattgatgagcgtctcatcaatccagatgggagcctcctgttccgggtgactatcaacggagtcaccggatggaggctctgcgagcgcatcctggcgtaa

SEQ ID NO: 241 - DNA, 621 bp, Artificial Sequence
  Modified Open Reading Frame
atggctgtctatccgtacgacgtcccggactacgcagggtacccgtacgatgtcccggactacgccgggtcatacccgtacgacgtacccgattacgccggatccggcgtatttacgctggaggacttcgtcggcgattggcggcaaaccgccggatacaacttggaccaggttctggaacaaggaggcgtcagctccttgttccagaacctgggtgtatccgtcacgccgatccagcgtatcgttctgtccggcgaaaacggactaaagatcgatatccacgtgattatcccgtacgagggattatcaggagaccagatgggacagatcgagaagatcttcaaggtcgtctaccctgtggacgaccatcacttcaaggttatccttcattacggtaccctagtgatcgatggtgttactcctaacatgatcgattactttgggagaccgtatgaaggtatagccgtcttcgacgggaagaagatcacggtcaccggaacattatggaacgggaataagatcatcgacgaacgactgatcaatcccgacggctcccttctgttccgggtgaccattaacggcgtcaccggatggcgcctgtgcgagcgcatcttggcgtaa

SEQ ID NO: 242 - DNA, 621 bp, Artificial Sequence
  Modified Open Reading Frame
atggcggtgtacccatacgacgtgccggactacgccggctatccgtatgatgtcccggactacgccgggtcgtatccctatgatgttcccgattatgccggctctggcgtcttcacgctagaggacttcgtaggtgactggcgccagacggccggctataatctagaccaggttctggaacagggaggtgtttcctccctgttccagaacctgggagtgtccgtgacaccgatccaaaggatcgttctttccggcgagaatggtctcaagatagacattcacgtgataattccctacgagggactgtccggagatcagatgggccagatcgagaagatctttaaagtggtgtatccagtggatgaccaccactttaaagtgattcttcattacggcaccctcgtgatcgatggtgtcacgcccaatatgatcgattatttcggacgtccctacgaagggatcgcggtattcgacggaaagaagattactgtcacgggcactctgtggaatgggaacaaaatcatagacgagcgattgatcaatccagatgggtcactcctcttcagagtgaccatcaacggagtcaccggctggcgactctgtgagaggatcctcgcgtaa

SEQ ID NO: 243 - DNA, 621 bp, Artificial Sequence
  Modified Open Reading Frame
atggcggtgtatccgtacgacgttccggattatgccggatacccgtacgacgtcccggactacgcagggtcatacccttatgacgtcccagattatgctgggagcggagtcttcaccctggaagacttcgtcggcgactggcgccagacggctgggtataacctggaccaggttctggaacaaggaggagtttcctccttgttccagaacctgggtgtctcggttacacccattcagcggatcgttctctccggagagaacgggctgaagattgatatccacgtcattatcccttacgagggtttgagtggagatcaaatgggtcagatcgaaaagatcttcaaggtggtctatccagtggatgaccaccatttcaaagtcattctccactacgggacgttggtcatagatggcgtaacgccaaatatgatcgactatttcgggcgcccgtatgagggcattgcggtgttcgatggcaagaaaattaccgtcacagggaccctgtggaacggtaataaaatcatcgacgaacgtctgattaatccagacgggagcctattgttccgcgtgacgatcaacggcgtcacgggatggcgattgtgcgagcgcatcttggcgtaa

SEQ ID NO: 244 - DNA, 621 bp, Artificial Sequence
  Modified Open Reading Frame
atggcagtgtatccgtacgatgtgccagactatgctggctacccatatgacgtgcccgactacgccggatcctatccctatgatgttccggactatgccggcagcggcgtcttcaccctcgaagacttcgtgggtgattggcgccagactgccggctacaatctggatcaggtcttggaacaaggaggcgtctcctctttgttccagaacctgggcgtctccgtgacgcccatacagaggatagtactatccggcgagaacgggctaaagatagatatccatgtcataattccctatgagggcctgtcaggcgatcaaatgggacagatcgagaagatcttcaaagtggtgtacccagtggatgatcaccatttcaaggtgatccttcactacggtacactggtgattgacggagtcactcccaatatgatcgactactttggcaggccctatgagggaatcgccgtcttcgacggcaagaagattaccgttaccggcacactctggaacggtaacaagatcattgatgagcggctcatcaatccagatggctcattgctctttcgggtcaccatcaatggtgtgaccggatggcggctttgcgagcgcatcctggcttaa

SEQ ID NO: 245 - DNA, 621 bp, Artificial Sequence
  Modified Open Reading Frame
atggcggtctacccgtacgacgtacccgactacgccgggtacccgtacgacgtgcccgactatgcgggctcgtatccgtacgatgtcccggattacgcagggtccggagtcttcacactcgaagacttcgtaggcgactggcgccagaccgccggctataatttagaccaggttctggaacagggcggagtctccagcctgttccagaacctgggagtgtcggtaacgccgatccagaggatcgttctgtcgggcgagaatggcctgaagattgacattcacgtgatcatcccgtatgaaggcctgtctggcgaccagatgggccagatcgagaagatctttaaggtcgtctacccggtagacgaccatcactttaaggtgatcctgcactacggtaccctcgtaatcgacggagtcactccgaacatgatagattacttcggtcggccctacgagggtattgccgtgttcgacggtaagaaaattaccgtcaccggcaccctctggaacggcaataagattatcgacgaacgcctaatcaatccggacggcagcctgctgttccgggtgacgattaacggcgttaccggctggcgcctatgcgaaaggatccttgcgtaa

SEQ ID NO: 246 - DNA, 621 bp, Artificial Sequence
  Modified Open Reading Frame
atggctgtctatccttacgatgtgccggactacgcgggctatccctacgatgtgccggactatgccggctcatatccctacgatgtgcccgactacgcgggctcgggtgtgttcacactcgaagacttcgtaggagactggcggcaaaccgctgggtacaatcttgatcaggtattggaacagggaggcgtaagctccctgttccagaacctcggcgtgtcagtcacgcccatccagagaattgtactctctggagaaaatgggttaaagatcgatatccacgtgatcattccctatgagggactatctggcgaccagatgggccagatagagaagatctttaaggtcgtctacccggtagacgaccatcatttcaaggtgatcctacactatggcaccttggttatcgacggcgtcacgccgaacatgatcgactactttggtcgaccgtacgaaggcatcgctgtcttcgacggcaagaaaatcaccgtgactggcacgctgtggaacgggaataagatcatcgacgagcgattgatcaatcccgacgggagcctcctgttccgggtaaccattaatggtgtcaccggatggaggctctgcgagaggatcctcgcgtaa

SEQ ID NO: 247 - DNA, 621 bp, Artificial Sequence
  Modified Open Reading Frame
atggccgtttatccctacgatgtacccgactatgcaggctatccctatgacgtacccgactatgctggaagctacccttatgacgtcccagattatgcaggaagcggtgtatttacattagaagactttgttggcgattggagacaaacagctggatataatttagatcaagtgttagaacaaggaggtgtgagtagtttgtttcaaaatttaggagtaagtgtgacacccatacaacgaatcgtgctatcaggagagaatggactaaagattgacatacacgtgattattccttacgaaggcttaagtggagaccaaatgggacaaattgaaaagatatttaaagtagtataccctgttgacgatcaccactttaaagttatattgcattatggaacattagttatcgacggcgttacacccaacatgatagattactttggcagaccttatgagggaattgcagtatttgatggaaagaaaataacagtaacaggaacactttggaatggaaacaaaattatcgatgagcgtttaatcaacccggatggatctttactatttcgtgtgaccataaatggagtaactggctggcgactttgtgaacgtattcttgcttaa

SEQ ID NO: 248 - DNA, 621 bp, Artificial Sequence
  Modified Open Reading Frame
atggctgtatacccttatgacgttcccgattatgctggatatccttatgacgtacctgactatgccggaagctacccttatgacgttccagattatgctggtagtggcgtgtttacattggaagatttcgtgggagattggcgacaaacagcaggatataatttagatcaagtgttagagcaaggtggagtgagcagtttatttcaaaatttaggagtatcagtaacaccaattcaaagaattgtcttgtcaggagaaaacggactgaaaattgatatccatgttataataccatacgaagggctgagcggagatcaaatgggacagatagagaagatatttaaagttgtatatcctgtggacgatcatcatttcaaagtcatattacactacgggacattagtaattgatggagtaacgccgaatatgatagattactttggaagaccttatgaaggaatagcagtatttgacggaaagaaaattacagtgactgggacactatggaatgggaataagataatagacgaaagattgataaaccctgatggaagcttattatttagagttacgattaatggagttacaggttggcgcttgtgtgaacgtatattggcttaa

SEQ ID NO: 249 - DNA, 621 bp, Artificial Sequence
  Modified Open Reading Frame
atggcagtttatccttatgacgttccagactacgctggttatccctatgacgtacctgactatgccggttcttatccttacgatgtgcccgattatgctggaagtggagtatttacattagaagactttgtgggagattggagacaaacagcaggatataatttagatcaagtactagagcaaggaggtgtatcaagcctgtttcaaaaccttggcgttagtgtcacaccaattcaaagaatcgtgctaagcggcgaaaatggacttaaaatcgatatacacgttataataccttatgaagggctaagtggagatcaaatgggacagattgaaaagatatttaaagtagtatacccggtagacgatcatcatttcaaagttatattacattacggcacgcttgtgattgacggagttacaccaaatatgatagattatttcggacggccatatgagggaatagcggtatttgacggaaagaaaattacagtaacaggaacactatggaatggaaataaaataatagacgaaagactgataaacccagacggaagcttgctattcagagtaacaattaacggagtgacaggttggaggctgtgtgaacgaatattagcataa

SEQ ID NO: 250 - DNA, 621 bp, Artificial Sequence
  Modified Open Reading Frame
atggctgtgtatccatatgacgtacctgattacgccggctatccatatgacgtacccgattatgctggcagctacccatatgacgttcccgattatgcaggttcaggtgtatttacattagaagactttgtaggtgactggcgacaaactgcaggatataatttagatcaagtattagagcaaggcggagtttcttcattatttcaaaatttaggagtttctgtgacaccaattcaacgcattgtattatctggagagaacggacttaaaattgacatccacgtgattataccatatgaaggactttcaggagaccaaatgggccaaattgagaaaatatttaaagttgtataccctgtagacgatcatcactttaaggttatattacattacggcacactagttatagacggagttacaccaaacatgattgattatttcggacggccttacgagggtatagcagtatttgatgggaagaaaataactgtgactgggactttgtggaatggaaataaaattattgatgaaagactgattaacccggacggatctttattatttagagtgacaataaatggcgttacaggatggcgactatgtgaaagaatattggcttaa

SEQ ID NO: 251 - DNA, 621 bp, Artificial Sequence
  Modified Open Reading Frame
atggctgtatatccatacgacgttcctgattacgctggctacccttatgacgtacctgactatgccggaagttacccatatgatgttcccgactatgctggcagcggagtatttaccttagaagatttcgtaggagattggagacaaacagccggatataatttagaccaagtacttgaacaaggaggagtgagcagtctatttcaaaacttaggagtgagtgtaacgcccatccagagaattgtgctaagcggagaaaatggcctgaaaatcgatatacacgtgatcataccatacgaaggattaagcggcgaccaaatgggacaaattgagaaaatatttaaagttgtatacccagtagatgaccaccatttcaaagtaatattgcattacgggacccttgtgatagacggcgtgacaccaaatatgatcgactactttggacggccttatgaaggaatagcagtgtttgatggtaagaaaataacagtgactggtacactttggaacggaaataaaataattgacgagagacttattaaccctgacggaagcttactatttcgagtgacaattaatggagtaacaggttggcgactttgtgagagaatcttggcttaa

SEQ ID NO: 252 - DNA, 621 bp, Artificial Sequence
  Modified Open Reading Frame
atggctgtgtacccttatgacgttcctgactatgccggatacccatacgatgtgcctgactacgctggatcttacccatatgacgtaccagattatgccggaagcggagtgtttactcttgaagatttcgtaggagattggcgacaaaccgcgggatacaatttggatcaagtattagaacaaggcggcgtttcttcattatttcaaaacctcggagtatcagtgacaccaatacaaagaattgtactatcaggcgaaaacggacttaaaattgatatacatgttattataccatatgaaggattgagcggcgaccaaatgggacaaatagagaaaatatttaaagttgtttatccagttgacgaccaccactttaaagtaatactgcactacggaacccttgttattgacggagtgacaccaaacatgatagattatttcggaagaccatatgaaggtattgctgtgttcgatggaaagaaaataacagtaactggaacattatggaatggaaataaaattatagacgaacgactcataaacccagatggatcattattatttcgtgtaacaattaatggcgtaaccggttggaggctttgcgagagaatcctggcataa

SEQ ID NO: 253 - DNA, 621 bp, Artificial Sequence
  Modified Open Reading Frame
atggcagtttatccctatgacgttccagactatgcaggctacccttatgatgtaccagactatgcaggatcttatccatacgacgttccagactatgccggctcaggagtatttacattagaggactttgtgggtgattggcgacaaactgcaggatataatttagatcaggtattagaacaaggaggagtgtcatctttatttcaaaacttaggcgttagtgtgactccaatacagcgcattgtgttgtcaggtgaaaatggacttaaaattgatatacacgttattattccttatgaaggattgagcggagaccaaatgggccagattgaaaagatatttaaagtagtatacccagttgacgaccaccactttaaagttatattacattacggtactttagtaattgacggcgttacacctaatatgattgattactttggacgaccatacgaaggcattgcagtgtttgatggaaagaaaattacagttacaggtacactttggaatggaaacaaaattattgacgaacgcttaattaatcccgacggctcacttctatttcgcgtaacaattaacggagttacaggttggagactttgtgaacgcatattagcataa

SEQ ID NO: 254 - DNA, 621 bp, Artificial Sequence
  Modified Open Reading Frame
atggccgtttatccgtatgatgttcctgactacgctggttacccttatgatgtacctgactatgcaggctcttacccatatgatgtgccagattatgccggaagtggtgtgtttactttagaagactttgttggcgattggagacaaactgcaggttataatctagaccaagtattagaacaaggcggagtttcttcattatttcaaaacttaggagttagcgtaacaccgattcaaagaatagtattaagtggcgaaaatggtttaaagatagatattcatgtgattatcccttacgaaggtttaagcggcgatcaaatgggacaaatagaaaagatatttaaagttgtatatccagtagacgatcatcatttcaaagttattctccattatggcacactcgttatagacggcgtcacaccaaacatgatagattatttcggacgaccttatgaaggaattgctgtatttgatggaaagaagattactgtgactggaactttatggaatggtaataagataatagatgaacgcttaataaaccctgacggatctctgttgtttcgagtgacaataaatggcgttactggttggagattatgtgaaaggattctggcctaa

SEQ ID NO: 255 - DNA, 621 bp, Artificial Sequence
  Modified Open Reading Frame
atggctgtatatccttacgatgttcccgattatgctggctacccttatgatgttcctgactacgctggaagctacccatatgacgtacctgactatgctggatctggagtatttacattagaagatttcgttggtgattggagacaaactgctggatataacctagatcaagtcctcgaacaaggcggagtatcatccctatttcaaaatctcggcgtttcagttacacccattcaaagaatagtactgtctggagaaaatggattaaagatagacatacacgtgataataccatatgaaggattgagtggagaccaaatgggacaaatagagaagatatttaaagtcgtatacccagttgatgaccatcactttaaagttattctgcactatgggacattagttatagacggcgttacacctaacatgattgattactttggaagaccgtatgaaggcattgctgtgtttgatgggaagaagattacagttaccggaactctatggaatggaaataagataatagacgaacgactgattaatcccgatggttcattgttattccgcgttacaataaatggtgttaccggctggcgattatgtgaacgtattcttgcttaa

SEQ ID NO: 256 - DNA, 621 bp, Artificial Sequence
  Modified Open Reading Frame
atggccgtttatccttacgatgtgcccgactatgctggctatccttacgatgttcccgattatgcaggctcatacccatatgacgtgcccgattatgcaggaagtggagtatttaccttagaagactttgtcggtgattggaggcaaacagctggttacaatttagatcaagtgctagaacaaggcggcgtatcttcattattccaaaacttaggcgtaagcgttacaccaatacaaagaatcgtgttatcaggtgaaaatggacttaaaatagatattcatgttattataccatacgagggtttaagcggagatcaaatgggacaaattgagaaaatatttaaagttgtatatccagtggacgatcatcactttaaagttattctgcactatggtacattagtaatcgacggagttacaccaaatatgattgactactttggacgaccttacgaaggaattgcagtgtttgatggaaagaaaattacggtgacaggaacactatggaatggtaataaaataattgacgaaagactaattaatccagacgggtcactactgtttcgagttacaataaatggcgttacaggatggaggttatgtgaaagaatcttggcttaa

SEQ ID NO: 257 - DNA, 621 bp, Artificial Sequence
  Modified Open Reading Frame
atggcagtatatccgtacgacgttccagattacgcagggtacccttatgacgtcccggattatgccgggagttacccttacgacgtcccggattacgccgggtcgggtgtattcaccctggaggactttgttggagattggcggcagacagcaggctacaatctggatcaggttctggaacagggaggtgtgagctccctgttccagaacctgggtgtctcggtgacacccattcagcgcatcgtcctttccggagagaacggcctgaagatcgatatccatgtgattattccctatgaagggttatctggcgaccagatgggccagatagagaagatcttcaaggtcgtgtacccagtggatgatcatcactttaaggtgatcctccactatggtaccctcgttatagacggtgtcacgccgaatatgatcgactatttcggcagaccctacgagggtatagcggtgttcgacgggaagaaaatcaccgtaacgggcactctctggaacgggaacaagattatcgacgagcgcctgataaatccagatggtagcctgctgttccgagtcaccatcaacggcgtgacaggttggcgactgtgcgagcggatcctagcttaa

SEQ ID NO: 258 - DNA, 621 bp, Artificial Sequence
  Modified Open Reading Frame
atggcggtttatccgtacgacgttccggattatgccggatatccgtacgacgtgcccgactacgccgggagctacccgtatgatgtcccagactatgctggctccggtgtatttacactggaggacttcgtcggtgactggcgtcagaccgcagggtacaacctggaccaggttcttgaacagggaggagtctcctccctgttccagaacctgggagtctccgtgactcctatccagagaattgtgctctctggagagaatggccttaagatcgacatacacgtgatcattccttatgagggcctgtctggcgaccagatgggccagatcgagaagatcttcaaggtcgtctatccagtagacgaccatcactttaaggtcattctccactatgggacgctagtcatcgacggagtcactccgaatatgattgactatttcggaaggccctacgagggcattgccgtatttgacggcaagaaaataacagtcacgggcactctgtggaacggcaataagattatagacgagcggctcatcaatcccgatggcagtcttctgtttcgggttactatcaacggcgtgaccggatggcgcctctgcgagcggatcctcgcctaa

SEQ ID NO: 259 - DNA, 621 bp, Artificial Sequence
  Modified Open Reading Frame
atggctgtgtacccttacgacgtcccggactacgctggatacccgtacgacgtcccggactacgcaggatcctatccttacgacgtgcccgattacgctggatcgggcgtgttcacactcgaagacttcgtcggcgactggcgccagacggcaggttataacctggaccaagttctggaacagggaggagtttcctctctgttccagaacttgggtgtgagtgtcacgcccatccagcgtatcgtgctgtccggagaaaatgggctgaagattgacatccatgtcatcatcccttacgaagggctgtccggagatcagatgggacagatcgagaagatcttcaaggtggtgtacccagtggacgatcaccacttcaaggtgatcctccactatggtacactcgtcatcgatggcgttactcccaatatgatcgattatttcggacgcccttacgaagggattgccgtcttcgacggcaagaagatcactgttaccggcaccctatggaacggtaacaagatcatagatgagaggctcatcaatccggacggatcgttgctcttcagagtgacgatcaacggcgtgactggatggcggctgtgcgagaggattctcgcataa

SEQ ID NO: 260 - DNA, 621 bp, Artificial Sequence
  Modified Open Reading Frame
atggctgtttacccgtacgacgtcccagactatgctgggtatccatacgatgtaccggattacgctgggtcatatccctacgatgtgcccgattacgcgggctccggtgtgttcacactggaggacttcgtcggcgactggcgccagaccgccggctacaacctcgaccaggtcctggaacagggaggtgtatcctccctgttccagaacctgggtgtaagcgtcactccgatccagaggatcgttctctccggagagaacggtctcaagatcgacattcacgtgataatcccttatgagggattatcaggagaccagatgggccagatcgagaagatctttaaggtggtgtacccggtggacgaccaccactttaaggtcatcttgcattatggcactctggtcatcgacggagtgacgcctaacatgatcgactacttcggccgcccttacgagggcatcgccgtgttcgacggtaagaaaattaccgtcaccggtacattgtggaatggaaacaagatcatcgatgagaggctgattaatccagatggcagcctgttattccgggtgacgatcaacggtgtaacaggctggcggctgtgcgagcgtatactggcgtaa

SEQ ID NO: 261 - DNA, 621 bp, Artificial Sequence
  Modified Open Reading Frame
atggccgtctatccgtacgacgtccctgactatgcagggtacccgtacgacgtcccggactacgcgggcagttacccttatgacgtgccagactacgctggctctggcgtgttcacgctagaggatttcgtcggcgactggcgccagacagccggctataatctggaccaggttctggaacaaggaggagtctcctccttgttccagaacctgggtgtgtctgtcacacccatccagaggatcgttctttccggagagaacggtcttaagatagatatacacgtcattattccctatgagggtctctcgggagaccagatgggacagatcgaaaagatctttaaagtggtgtatcctgtggatgatcaccactttaaggtgatccttcactacggcaccttagtcatcgatggagttactccaaatatgattgactatttcgggcggccgtatgaagggatcgccgtgttcgacggtaagaagattaccgtgacaggtaccctgtggaacggtaataaaattatcgacgaacggctgattaaccctgatgggtccctactgttccgggtaactattaacggcgtgactggttggcgcctctgcgagcggattctagcttaa

SEQ ID NO: 262 - DNA, 621 bp, Artificial Sequence
  Modified Open Reading Frame
atggcggtgtatccgtacgacgtcccggactacgcgggctacccgtatgacgtaccggactacgccggtagctatccctacgacgttcctgactacgctgggtcgggcgtgttcacactcgaggatttcgtgggcgactggcggcaaaccgccggttacaacctcgaccaggttctggaacagggaggagtctcctccctgttccagaacctgggcgtgagtgtcacgcccatccagcgcattgtcctctcaggcgagaatggcctgaagatcgacatccatgtgatcatcccgtacgaaggcctatctggtgatcaaatgggacagatcgaaaagatctttaaggtggtctaccctgtggatgaccaccacttcaaggtcatcctgcactatggcactcttgtcatagacggtgtgacaccgaacatgatcgactatttcggtcgcccttacgagggcattgccgtctttgacggcaagaagatcactgttacaggaacgttgtggaatggcaataagattatcgatgaacgattaatcaaccctgacgggtccctattatttagggtgactatcaatggagtcactggatggcgactatgcgagcgcatcctggcgtaa

SEQ ID NO: 263 - DNA, 621 bp, Artificial Sequence
  Modified Open Reading Frame
atggcggtatacccgtacgacgtacccgattatgcagggtatccgtacgacgttccagactatgccggcagctatccttatgatgtgccggattatgctggtagcggagtgttcacgttggaggatttcgtaggagactggcgccagacagccggttataacttggatcaggttctggaacagggaggcgtctcctccctgttccagaacctgggtgtcagcgtgacaccgatccagaggatcgtactgtctggcgagaacggtctcaagatcgatatccacgtgatcattccgtacgaaggcctatctggtgatcagatgggccagatcgagaagatcttcaaggtggtgtacccagtcgatgaccatcatttcaaagtgatccttcactatggaaccttggtcatcgacggtgtgacaccaaatatgatagattacttcgggcgcccatacgagggtatcgcggtgttcgacggcaagaagatcaccgttacaggtaccctctggaatgggaacaagataattgatgagcggctcatcaatcccgacgggagcctgttgttccgtgttaccatcaacggagtaacaggctggcgcttatgcgagcgcatactggcttaa

SEQ ID NO: 264 - DNA, 621 bp, Artificial Sequence
  Modified Open Reading Frame
atggcggtatacccgtatgacgtgccggactacgctgggtatccatacgatgttccggattacgccggatcatatccgtacgacgttccggattacgccggctccggcgtcttcactcttgaagatttcgtcggagactggcgtcagacagcgggttataacctagaccaggtgctggaacagggtggcgtttccagcctgttccagaacctgggcgtgtccgtcacgccgatccagcgcatcgtcctctcgggcgagaatggattgaagatcgatatccatgtgattataccctatgagggtctatctggcgaccagatgggtcagatagagaagatcttcaaggtcgtctacccggtagacgaccatcactttaaggtgatcctccattacggcacgttggtaatcgatggcgttacgcctaacatgatcgattactttggacggccgtatgagggaattgccgtcttcgacggcaagaagatcaccgtcaccgggaccctttggaacgggaacaagatcattgatgagcgactcatcaacccggacggttctcttctgtttagggttacaatcaacggcgtgacgggctggcgcctatgcgagcgcatcctggcgtaa

SEQ ID NO: 265 - DNA, 621 bp, Artificial Sequence
  Modified Open Reading Frame
atggccgtctatccttacgacgtcccggattacgcgggatatccgtacgacgtgccggactacgccgggtcttacccgtatgacgtgcccgattatgcgggctccggcgtgttcacgctggaggatttcgttggcgattggcgccaaacggccggatacaaccttgatcaggttctggaacagggcggcgtgtcgtccctgttccagaacctaggtgtatccgtcactccaatccaaaggattgttctctccggagagaatggcctgaaaattgatatccacgtcatcatcccttacgaagggttgagtggagatcaaatgggccaaattgagaagatattcaaggtggtgtacccggtggatgatcaccacttcaaggtgatcctccactatggtacccttgtcatcgacggcgtcacgccgaacatgatcgattatttcggccggccctatgagggcatcgcagtctttgacggtaagaaaattaccgtcactgggaccctgtggaacgggaacaagatcatcgacgagcgattgatcaatcccgatgggtccctcttgttccgggtgacgatcaacggcgtgactggttggcgcctgtgcgagcggatcctcgcataa

SEQ ID NO: 266 - DNA, 621 bp, Artificial Sequence
  Modified Open Reading Frame
atggctgtgtatccctacgacgtgccggactatgccggctacccgtacgacgtgccggattacgctggctcctatccctacgacgtcccagactacgccggatccggcgtattcactctggaggacttcgtaggagattggaggcagactgccgggtacaacctcgaccaggttctggaacagggcggagtgtccagtctgttccagaacctgggcgtctcagtgacgcccatccagaggatcgtactgagcggtgagaatggattgaagattgacatccatgtcattataccctacgagggcctgtcgggagatcaaatgggacagatcgagaagatcttcaaagtagtctatcccgtcgatgaccaccacttcaaagtgatcttacactatgggacgctggtcatcgacggcgtaacaccgaatatgatagactactttggcaggccctatgagggtatagcagtattcgacggcaagaaaatcacggtcacagggaccctgtggaatgggaacaagatcattgatgagcggctcatcaatcccgacgggagcctgctgttccgtgtcaccatcaatggtgttacgggatggcggctgtgcgagaggatcttggcctaa

SEQ ID NO: 267 - DNA, 621 bp, Artificial Sequence
  Modified Open Reading Frame
atggctgtgtacccatacgatgttcccgactatgctggttacccttacgatgttccggattatgctggttcttacccttacgatgtacccgattatgcaggctcaggagtgtttactttagaagactttgttggagattggagacaaaccgcaggttataatttagatcaagtattagaacaaggaggcgtgagttctttatttcaaaacttaggagtttctgtaacacctattcaaagaattgttctgagtggagaaaatggactgaaaatagatatacatgttataatcccttatgaaggactgagcggcgaccagatgggacaaattgaaaagatatttaaagttgtatacccagtagacgatcatcatttcaaagtaatattgcattatggcactttagtaatagatggagtaacgcccaacatgatagattatttcggaagaccttatgaaggaattgcggtgtttgatggaaagaaaattactgtgactggtactttatggaatggaaataaaattatagatgaacgacttataaatcccgacggcagtttattattcagagttacaatcaatggcgtaacaggctggagactttgtgaacgtatcttggcataa

SEQ ID NO: 268 - DNA, 621 bp, Artificial Sequence
  Modified Open Reading Frame
atggcagtctatccatatgatgtgcctgattacgctggttatccttatgacgttcccgattatgcaggaagctacccttatgacgtaccagactatgcaggaagtggtgtatttacattggaagatttcgttggagattggagacaaacagccggatacaatttggatcaagtattagagcagggcggagttagtagtttatttcagaacctaggagtaagtgtgacacccatacaaagaattgtgctaagtggagaaaacggattaaagatagacattcatgtaattataccgtacgaaggcttatcaggagatcaaatgggacaaattgaaaagatatttaaagttgtataccctgtagacgatcatcactttaaagtcatcttgcattacggaacattagtaattgacggagttacacctaacatgatagattacttcggcagaccatatgaaggaatagcagtgtttgatggaaagaagataacagttacaggaacactatggaatggcaacaaaataattgacgaacgcttgataaatcccgatggaagcttactgtttagagtcacgataaatggtgttacaggttggagattgtgtgaacgtatattggcttaa

SEQ ID NO: 269 - DNA, 621 bp, Artificial Sequence
  Modified Open Reading Frame
atggcggtctatccgtatgatgtgcccgattatgctgggtatccttatgatgtgccagattatgcaggtagttacccttatgacgtaccagattatgcaggaagtggagtatttacattagaggatttcgtaggtgattggagacaaacagcgggttataatttagatcaagttcttgaacaaggcggcgtatcatctttatttcaaaacttaggcgtaagtgttacaccaattcaaaggattgtattaagcggcgaaaatggattgaaaattgatatacacgttattattccatatgaaggtttgagcggagatcaaatgggtcagatagagaaaatattcaaggtagtttatccagtcgatgatcatcactttaaagttatactacactacggaacactagttattgatggcgtgacacctaacatgattgattactttggaagaccttatgagggaattgcagtatttgatggaaagaaaataacagtaacaggaacactatggaatgggaacaagattattgatgagagacttattaaccctgatggatctttgttatttcgagttacaattaatggagttactggatggagactatgtgaaaggatattagcttaa

SEQ ID NO: 270 - DNA, 621 bp, Artificial Sequence
  Modified Open Reading Frame
atggcagtatacccatacgatgtaccagactatgcaggctatccatatgacgttcccgactatgcaggctcatacccttacgacgttcctgattatgcgggctctggcgtatttacactcgaagactttgtaggagattggagacaaacggcaggttataatttagatcaagtattggaacaaggcggagttagtagtttatttcagaatttaggtgtatcagtgactcccattcaaagaatagtattaagcggtgaaaatggtttaaagatcgacatacacgtgataataccatacgagggtttaagcggagatcaaatgggacaaatagaaaagatatttaaggtggtttacccagtagacgatcatcactttaaggtaattcttcattatggtacattggtaattgatggtgtgactcctaatatgattgattatttcggaagaccttatgaaggaatagcggtgtttgatgggaagaaaataactgtaactggcactttatggaatggaaataagattattgatgaaagattaattaacccagatggaagtttattatttagagttactataaacggtgttactggttggcgactttgtgaaagaatcttggcttaa

SEQ ID NO: 271 - DNA, 621 bp, Artificial Sequence
  Modified Open Reading Frame
atggcagtttatccttatgatgtgccagattatgcaggatatccctatgacgtaccagattatgcaggcagctacccatacgacgtaccagattatgcaggaagtggcgtgtttacattggaggatttcgtaggagactggagacaaacggctggatataatttagatcaagtattagaacaaggtggagttagtagtctgtttcaaaatttaggtgttagcgttactcccattcagcgaattgtattatcaggcgaaaacggactcaaaattgacatacatgtaataatcccatacgaaggactaagcggagatcaaatgggccaaatcgagaaaatatttaaagttgtttaccctgtagatgaccaccacttcaaagtaatacttcattacggaacactagttatcgacggagttacaccaaatatgattgattatttcggaagaccatacgaaggaatcgctgtgttcgatggcaagaaaataactgtgactggaactttatggaatggcaataaaatcattgatgaacgactaattaatcctgacggaagcttactgtttagagtgacgataaatggagtgacgggctggagactttgtgaacgaatattagcataa

SEQ ID NO: 272 - DNA, 621 bp, Artificial Sequence
  Modified Open Reading Frame
atggcagtgtacccttatgatgtgcccgattatgcaggttacccttacgatgtgccagactatgcaggttcttatccatatgatgtgccagattatgcagggagtggtgtatttacgttggaagactttgtgggagattggaggcaaactgcaggatataatttggatcaggtgttggaacaaggtggtgtttcttcattatttcaaaacttaggtgtcagcgtcacgcccatacaaaggatagtgttatcaggagaaaatggacttaaaatagatattcacgtaataataccatatgaaggactttctggcgaccaaatgggacaaatcgagaaaatatttaaagttgtataccctgtagacgatcatcatttcaaagtaatattgcattatggaacccttgtaattgacggagtaacacctaatatgatagactatttcggaagaccatacgaaggaattgctgtgtttgatggaaagaaaattactgtaactgggacactttggaacggaaacaaaatcatagacgaaagattaattaaccctgacggttccttactatttcgagtgacaattaatggagttactggatggaggctttgtgaacggattcttgcttaa

SEQ ID NO: 273 - DNA, 621 bp, Artificial Sequence
  Modified Open Reading Frame
atggccgtctatccatatgatgttccagattatgccggctatccttacgacgtgcccgattatgcaggatcttacccatacgatgtacctgattatgccggaagtggagtgtttactttagaggatttcgttggagactggagacaaacagcaggatataatttagaccaagtattagaacagggaggagtaagtagcttatttcaaaatttaggagttagtgtgacaccaatacaaagaatagtgttgagcggagaaaatggtttaaagattgatatacatgtgataataccatacgaaggattaagcggagatcagatgggacaaattgaaaagatatttaaggttgtttatcccgtggacgaccatcactttaaagttattctgcattatggaacattggtgatagatggagtaacaccgaatatgatagactactttggccgaccatatgaagggattgcagtatttgatggcaagaaaataacagttacaggaacattatggaatggcaataaaattatagatgaaagattgataaatccagacggaagcttgctatttagggtgacaataaacggcgttactggttggcgattatgtgaaagaatcttggcttaa

SEQ ID NO: 274 - DNA, 621 bp, Artificial Sequence
  Modified Open Reading Frame
atggctgtgtatccttatgatgtacctgactatgctggatatccctacgacgtgcctgactatgctggttcttacccttatgatgtgcctgactatgccggttcgggagtatttacattagaagactttgtaggagattggaggcaaaccgcaggatataatctagaccaagtattagaacaaggaggagtaagtagtttatttcagaacctaggagttagtgttacgccgatacaaagaattgtgctttctggtgaaaacggtttgaagatagatatacacgtgattataccttatgaaggattaagtggcgatcaaatgggacagatagaaaagatatttaaagttgtatatccagttgacgaccatcatttcaaagtcatactacattacggaacgctagtaatcgacggagtcacacctaatatgatcgactactttggaagaccctatgaaggaattgctgtgtttgatggaaagaaaattactgtaactggtactttgtggaacggaaacaaaatcatcgacgaaagactaattaaccctgatggaagcttgttgtttagagtgacaattaacggtgttacaggatggagactatgtgaaagaatcttggcttaa

SEQ ID NO: 275 - DNA, 621 bp, Artificial Sequence
  Modified Open Reading Frame
atggccgtatacccatatgatgtccctgactatgctggctatccatatgatgtaccggactatgctggaagttacccttatgatgttccagattatgctggctctggcgtatttacccttgaagactttgttggcgattggagacaaactgcaggttataatttagatcaagtactagaacaaggtggtgtaagctctttatttcaaaacttaggcgtatcagtgacaccaatacaaagaatagtgttatcgggagaaaatggactaaagatagatatacatgttataataccatatgagggattaagtggagaccaaatgggacaaattgagaagatatttaaagttgtgtatcccgtcgatgatcatcatttcaaagttatattgcactacggaacactggtaatagatggagtaacaccaaatatgatagattactttgggaggccgtatgaaggtattgctgtgtttgatgggaagaaaataacagttactggcactttatggaacggaaataaaataatagacgaacgcttgatcaacccggacggttcattgttatttagagtcacaattaacggagttacaggatggagactatgtgaacgaatacttgcttaa

SEQ ID NO: 276 - DNA, 621 bp, Artificial Sequence
  Modified Open Reading Frame
atggcagtttatccgtatgatgttcccgactatgctggatatccttatgatgtacctgattatgccggatcctacccttatgacgttcctgattatgctggaagtggcgtgtttacattagaagatttcgttggagattggcgacaaaccgcaggatacaatttagatcaagtattagaacaaggtggcgtgagtagcttattccaaaatttaggtgtttcagtaactccaattcagagaatcgtgttgtcaggtgaaaatggtttaaagattgacattcatgtaataattccgtacgaaggcttatcaggagaccaaatgggacaaatagaaaagatatttaaagtagtatacccagttgacgaccaccatttcaaagttatattacattacgggacattagtgattgacggcgttacaccaaatatgatagactatttcggcagaccttacgagggaattgcggtatttgatggaaagaagattacggtaactggcactttatggaatggaaacaaaataattgacgagaggctaattaacccagatggatcacttctctttcgtgttacaattaatggtgttactggttggcgtttatgtgaaagaatacttgcctaa

SEQ ID NO: 277 - DNA, 621 bp, Artificial Sequence
  Modified Open Reading Frame
atggctgtatatccctatgacgtacccgattatgcagggtatccgtatgacgtacccgattatgcaggaagctatccatatgatgttcccgattacgccggatcaggcgtgttcacgttggaagatttcgttggcgattggaggcagacagcaggttacaatctggaccaggtgctcgagcaaggtggagtgagttcactgtttcaaaacctgggagtgagtgtaacgccgatacaacgcatagtgctctccggtgaaaacggtcttaagatcgatattcatgttattattccctacgaaggccttagcggtgatcaaatgggtcagatcgagaaaatctttaaggtagtctatccggtggacgaccatcacttcaaggtaattctgcactacggtaccttggtgattgatggcgtaacacccaacatgatcgattactttggtcgaccatacgaagggattgcagtgttcgatggcaagaagatcactgttactggtacgttatggaatggtaacaagattattgatgaaagactgattaatcccgacgggtctttgctgtttcgggttacaatcaatggagtcacgggttggcgtctctgtgagagaatcctcgcctaa

SEQ ID NO: 278 - DNA, 621 bp, Artificial Sequence
  Modified Open Reading Frame
atggcggtgtacccatacgacgtgccggactacgcgggatacccatatgatgtgccagattatgcgggtagttatccatatgatgttccggactatgcgggtagcggtgtattcaccctggaagacttcgtgggcgattggcgtcaaactgcgggctataatctagatcaggttctcgaacaaggaggcgtatccagcctgttccagaatttaggtgttagtgtcactccgatccagcggatcgtcctgtcaggtgagaatggtcttaagatcgatatccatgtcattattccctacgagggcctgagtggagatcagatgggccagatcgagaaaatcttcaaggtggtctatccagtcgatgatcatcactttaaggtgatccttcactatggcaccttggtgatcgatggcgttactcctaacatgattgactactttggaaggccttacgagggaatcgctgtatttgatggtaagaagataactgtgaccggtaccttatggaatggaaataagatcatcgatgaaagactaatcaatcctgacggatctttgctgttcagagtgaccatcaatggtgttacgggctggaggctgtgtgaaaggatcctggcttaa

SEQ ID NO: 279 - DNA, 621 bp, Artificial Sequence
  Modified Open Reading Frame
atggcagtgtatccatacgacgtcccggactacgcaggctacccttacgatgtgccagattacgcaggatcctacccgtatgatgtccctgactacgctggcagcggagtgtttaccctagaggactttgtgggcgactggaggcagactgcaggatacaatctagaccaggtcctggagcagggaggtgtctcatctttgttccagaatctgggcgtttctgtgactccgatccagcggatcgtcctgagtggcgagaatggactcaagatcgacatccatgtaataataccatatgaagggctctcgggcgaccagatgggacaaatagagaaaatctttaaggtagtgtatcccgtcgatgatcaccatttcaaggtaattctgcattacggtactcttgttatcgacggcgtgacgcccaacatgatcgactactttggtcgtccttatgagggcattgcggtatttgatggcaagaagattaccgtaacagggacgctttggaatggaaataagatcatcgacgagagacttatcaatccagatggtagcctgctcttcagggtaaccatcaatggtgtcacagggtggcgtctttgtgaacgcattctcgcataa

SEQ ID NO: 280 - DNA, 621 bp, Artificial Sequence
  Modified Open Reading Frame
atggccgtttacccatatgacgtaccagactacgcaggatatccgtacgatgttccggactacgctgggagctatccatatgatgttcccgattacgctggaagtggagtgttcaccttggaggatttcgtgggcgattggcgccagactgcaggctacaacctcgatcaggtgctagagcagggcggcgtgtccagcttatttcagaatctaggcgtgagtgttacacctatccagcgaatcgtgctaagtggagaaaatggcctgaagattgatatccatgttattattccatacgaaggactgtccggtgatcagatgggccagatcgaaaagatcttcaaggtcgtctaccctgttgatgatcaccactttaaggtaattctgcattacggtaccttggtcattgatggtgtgacgcctaacatgatcgactatttcggtcgtccctatgagggtattgcggtcttcgatggtaagaagatcacggtcacaggcaccttgtggaatggtaacaaaatcattgacgaaagacttatcaatcccgacgggtcacttctgtttcgtgtgactattaatggtgtaaccggctggagactgtgtgagcggattcttgcctaa

SEQ ID NO: 281 - DNA, 621 bp, Artificial Sequence
  Modified Open Reading Frame
atggcagtctatccctacgatgtcccagactacgctggctatccatatgacgtgccggactacgccggatcttacccatatgacgttccggattacgcagggtctggcgtattcaccctggaggactttgtcggtgactggaggcagacagcaggctacaatcttgatcaggtgttagaacagggtggagtgtcttcgttattccagaatttgggtgtgtcagtgacaccaattcagcggatcgtgctttctggagagaatggactgaagattgatatccacgtaattatcccttatgaagggctgtctggagaccagatgggacagatcgaaaagatatttaaagtcgtttatccggtcgatgaccatcacttcaaagtgattcttcactatgggacactggtaatcgacggagtaacaccaaatatgatcgattacttcgggcggccttatgagggaatcgccgtgttcgatggaaagaaaattacggttacaggtacgttgtggaacggaaacaagataatagacgagaggcttattaatcccgacggttcactcctcttcagagtcacaatcaatggtgtcactggctggcgcctgtgtgagcgcatcctcgcctaa

SEQ ID NO: 282 - DNA, 621 bp, Artificial Sequence
  Modified Open Reading Frame
atggcagtctacccgtacgacgtgccagactacgcgggatacccgtacgatgttccagattatgcgggcagctatccatatgatgttccagattatgccgggtctggagtgttcacattggaagacttcgtgggagactggagacaaaccgcaggctacaacttagatcaggttctagagcagggcggcgtgagcagtttgtttcagaacctaggcgtttctgtgacgccgattcaacggatcgtcttatccggtgagaacggtctgaagattgacattcatgtaataatcccttatgagggactgtccggagatcagatgggtcaaatcgagaaaatatttaaggtggtgtaccctgtcgatgatcatcatttcaaggtaatactgcattacggtaccttagtgatcgatggagtcacacctaatatgatcgattactttggacggccctacgagggtattgcagtattcgacgggaagaaaatcacagtgacaggtacgctgtggaatggcaataaaattattgacgagcggctgatcaacccggatgggtcgcttctgttccgggtcacaataaacggagttacgggttggagactctgtgaacgtatattagcttaa

SEQ ID NO: 283 - DNA, 621 bp, Artificial Sequence
  Modified Open Reading Frame
atggcagtttacccatatgacgtcccagattacgcaggatacccatatgacgttccagattacgccggctcttacccttacgatgtccctgactatgcaggtagtggcgtatttaccctcgaggactttgtgggagattggcggcagacggccggatataacctcgatcaggtattggaacagggaggcgttagctcactatttcaaaacttaggcgtgagtgtcactccaattcaaaggatagtcctaagcggcgagaatgggctcaaaatcgatatccatgttatcattccatacgagggtctcagtggcgatcaaatgggccaaatcgagaagatcttcaaggttgtgtacccggtggatgatcaccactttaaggtgattctccactatgggacccttgtgattgacggagtgactcccaacatgatcgattatttcggccgaccttatgagggaattgctgtgtttgatggtaagaaaattaccgttactgggaccctctggaatggtaacaagataatagacgagcgattaatcaacccagacggctctttactcttccgcgtgactattaatggagtgacaggttggcgcctctgcgagcgcatactggcttaa

SEQ ID NO: 284 - DNA, 621 bp, Artificial Sequence
  Modified Open Reading Frame
atggctgtatatccttatgacgtgccggactacgccgggtatccgtacgacgtcccagattacgcgggaagctatccatatgatgtacccgattatgcgggatccggcgtattcacgcttgaggactttgttggcgactggcgacagaccgcaggatataatttggatcaagttctggagcaaggaggcgtaagttcactattccaaaatctgggcgtgagtgtcacgcctattcagcggatcgtactaagtggcgaaaacggcctaaagattgacattcacgtgatcattccctatgaaggcttgtccggagatcagatgggtcaaattgagaaaatcttcaaagtggtttatcccgtagatgatcaccactttaaagtcatactgcattacggaacacttgtcattgatggcgtgacgccaaacatgatcgactacttcgggagaccttatgagggtatcgcagtcttcgatggtaagaaaatcacggtcacgggaaccctgtggaacgggaataaaatcattgacgagcggctcataaatcccgatgggtcgcttctgtttcgcgtcaccatcaatggagtgacaggctggaggttgtgtgaaaggatcttagcctaa

SEQ ID NO: 285 - DNA, 621 bp, Artificial Sequence
  Modified Open Reading Frame
atggcggtttatccctacgacgtacccgactacgcgggatatccctacgacgtgcctgattacgctggtagctatccatatgacgttccggattatgcgggcagtggcgtctttactctcgaggactttgtcggagattggcgccagactgcaggctataatcttgaccaagttctagaacagggtggagtgtctagcttatttcagaatctcggcgtatccgtaacgccaatccagaggatcgttctttctggcgagaacgggttaaagatcgacatccatgtcattattccatatgagggattgtccggtgaccagatgggacaaatcgagaaaatctttaaagttgtctatcctgttgacgaccatcacttcaaagtgatccttcactatggaactcttgtaatcgatggtgttacaccgaacatgatcgattactttggacgaccatatgagggaattgccgtgtttgacgggaagaagatcacggtgacgggtactttgtggaatggcaataagataatcgacgagagattgattaatcccgatgggtcccttctgttccgcgtaacaatcaatggagtgactggatggcgcctgtgcgaaagaatcctcgcctaa

SEQ ID NO: 286 - DNA, 621 bp, Artificial Sequence
  Modified Open Reading Frame
atggcggtgtacccttacgacgtaccagactacgcaggatatccatatgatgttccggactacgccggaagctatccctacgacgtcccggattatgccgggtcgggcgtctttacattggaggactttgtcggagattggcgccaaactgctggatacaatttagatcaagtgttagaacaaggcggcgtctccagcttgttccagaatctgggagtttctgtgacgccgatccagcgaatcgtcctgagcggagagaacgggttaaagattgacattcacgtgataataccatatgagggcttgtccggtgaccaaatgggtcagatcgaaaagatatttaaagtggtttatcccgtcgatgaccaccactttaaggttatccttcattatgggactctcgtcattgatggcgtgactcccaacatgatcgattactttggacggccgtacgagggaattgcggtcttcgacgggaagaaaattactgtcacgggcacgctctggaatgggaataagattatagatgagcgtctcattaacccggatggctcgttactgttcagggtgaccataaacggcgttacaggctggcgcctctgcgaaaggattctagcataa

SEQ ID NO: 287 - DNA, 621 bp, Artificial Sequence
  Modified Open Reading Frame
atggcagtctacccttacgatgttcctgattacgctggatacccttacgacgtgcccgactacgcgggcagctacccatacgacgtgccagattacgccggttcaggcgtgtttacattagaagatttcgtgggcgactggagacaaacagctgggtacaacctggatcaggtgcttgaacaaggcggcgtttcctccctgtttcagaatctgggagtgtcagtaactcctatacagcggattgtgctgtctggcgaaaatgggctgaaaattgatatccatgtcatcatcccatatgagggattgtccggagatcagatgggccaaattgaaaagatctttaaagtcgtctacccggttgacgatcaccatttcaaggttattctacattacggcacccttgtgatagacggcgttacacctaatatgattgactactttggaaggccctatgaagggatagccgtctttgatgggaagaagataaccgtgacaggtacactctggaacgggaataaaattatcgacgagagattgatcaatccagacgggtctttgctgtttagggtaaccatcaacggagtgacaggatggcgtttgtgcgagcgaattctagcttaa

SEQ ID NO: 288 - DNA, 621 bp, Artificial Sequence
  Modified Open Reading Frame
atggcagtctatccatatgatgtcccggattacgccggatatccatacgacgtgccagactatgccggaagctacccatacgatgtacctgattacgccgggtccggcgtgttcactctcgaggatttcgttggcgactggcgccagacagctggctacaatctggaccaggtcctcgaacaaggtggtgtcagctcattattccagaatctaggtgtgagtgtgactccaatccaaagaatagtactcagcggcgagaatggcctgaaaatcgatatacatgtgattattccatatgagggcctgagtggagaccagatgggtcaaatcgagaaaatattcaaggtggtctatccagtggatgaccaccactttaaggttattctgcattatggaactctcgtcatagatggagtaacaccaaatatgattgattactttgggagaccctatgagggaatagccgtgtttgacggcaagaagatcaccgtgacaggtaccttgtggaatgggaataaaatcatagatgagaggctaattaatcccgatggttctctcctgttcagagtgacaatcaacggagttacaggttggcgcctgtgcgaacgaatccttgcgtaa

SEQ ID NO: 289 - DNA, 621 bp, Artificial Sequence
  Modified Open Reading Frame
atggcagtgtacccttacgacgttcccgattatgccggatatccgtacgacgtgcctgattatgctggctcctatccatacgacgttccggactacgccggtagcggcgtgttcacattggaagacttcgtgggtgattggaggcagaccgcaggatacaatctcgatcaggtgctggaacaaggcggcgtctcaagtctcttccaaaatttaggagtctccgtgactcctatccagcggatcgttctgtccggtgaaaacggactgaagatcgatattcatgtaattattccctatgaaggcctctccggcgaccagatgggtcaaattgagaaaatctttaaggtggtgtacccagtcgatgaccaccacttcaaagtgatcctacattacgggacactcgtcatcgacggagtcactcccaacatgattgattacttcggtcgtccttatgagggtatagccgtgttcgacggaaagaaaatcaccgtcaccgggactctctggaacggcaacaagattattgatgagcggctcatcaaccctgacggcagtttgctatttcgagtcacgatcaatggcgtgaccgggtggcggctctgcgaaaggattctcgcataa

SEQ ID NO: 290 - DNA, 621 bp, Artificial Sequence
  Modified Open Reading Frame
atggcagtgtacccttacgacgttccggattatgccggctatccatacgatgtacctgattacgccggtagctatccttatgacgtgcccgattacgccggctctggcgtgttcacactagaggactttgtaggagactggcggcagactgccggctataacctggaccaagtgcttgaacagggcggcgtgtcatctctgtttcagaatcttggcgtgtctgtgactcctatacaaagaattgtgctctccggcgagaacgggcttaagatcgatatccatgttattatcccatacgaaggcctgtccggcgatcaaatgggacagatagagaaaatatttaaggtggtctatcccgtagacgatcatcatttcaaagtcattcttcactatggaaccttggtgatcgacggcgtaactcctaatatgattgactactttggaagaccttacgaaggaatagccgtgttcgacggcaagaaaataaccgtaaccgggaccctgtggaacggtaataagatcattgatgagcggcttatcaatccagacggttcacttctcttccgagtgactatcaatggcgtaactggatggagattgtgtgaacgcatcctcgcataa

SEQ ID NO: 291 - DNA, 621 bp, Artificial Sequence
  Modified Open Reading Frame
atggcagtgtatccatatgatgtcccagactatgccggctacccttacgacgtccctgattacgccgggtcctacccgtacgatgtgcccgattacgcgggaagcggtgtgtttacactggaggatttcgttggcgactggaggcagactgccggctataatctggatcaagtcctggagcagggaggcgtttcaagcctcttccagaacctcggcgtctcagtcacacccattcagaggattgtcctgtcaggagagaatggtctcaaaatagatatccacgtcataatcccttatgagggactgtcaggtgatcaaatgggccaaatcgagaagatattcaaggttgtctatccagtggatgatcatcactttaaagtgattcttcactatggaaccctggttatagatggtgtgactcctaatatgatcgactatttcggtaggccatatgagggcattgctgtatttgacgggaagaaaattactgtcaccggtacattgtggaatgggaataaaatcattgatgagaggcttattaatcccgatggatcgctgttattcagggttactatcaatggcgttacgggatggcgtctgtgtgaacggatcctggcctaa

SEQ ID NO: 292 - DNA, 621 bp, Artificial Sequence
  Modified Open Reading Frame
atggcagtgtatccgtacgacgtgcccgattacgccgggtatccatacgatgtgccagactatgctgggtcttatccttatgatgtacccgactacgcgggcagcggcgtgttcacgttagaggacttcgtgggcgactggcggcaaactgcaggctataacctggaccaagtgctcgaacaaggaggcgtcagttccctgttccaaaacctaggagtctccgtgacaccgattcaaagaatagtcctctctggcgagaacggcctcaaaatcgacatccatgtgatcataccttatgaaggtctgagcggtgaccaaatgggccaaattgaaaagatatttaaggtggtctatcccgtcgatgatcatcatttcaaggttatactgcattatggtaccctcgtcattgacggcgtgactcctaacatgatcgattacttcgggaggccctacgaaggaattgctgtctttgatggcaagaaaatcacagtgacgggtactttgtggaatgggaataaaataattgacgaacgattaattaacccagatgggtcgctcctgtttagagtgacaataaacggtgtcactggatggcgcctgtgcgagcggatactggcctaa

SEQ ID NO: 293 - DNA, 621 bp, Artificial Sequence
  Modified Open Reading Frame
atggcagtgtatccttatgacgttcctgattatgcaggctacccttatgacgtccctgactacgccgggagttatccctacgacgtgcccgactatgcaggcagcggcgtatttacacttgaggactttgtgggagattggaggcagaccgctggctataacttggatcaggtgttggagcagggaggcgttagtagcttatttcagaacctgggtgtcagtgtaacacccattcagcggattgtgctctcaggagagaacggcctcaagattgacattcatgttattataccctacgagggtctgagcggtgaccagatgggacagatagagaaaatcttcaaggtggtttacccggttgacgaccaccactttaaagtgatcctccactatggaacactggtgatcgatggagtgactccaaatatgatcgattatttcgggcgtccatatgagggcattgcagtctttgatggaaagaaaataacggtcacaggtacactatggaatggaaacaaaataatagatgagcgactgataaatcccgatggctccctcctatttcgcgtgacgattaacggagtaactgggtggaggctgtgtgagaggatcctcgcctaa

SEQ ID NO: 294 - DNA, 621 bp, Artificial Sequence
  Modified Open Reading Frame
atggcagtttacccgtacgatgtgccagattatgctgggtacccatacgacgtacccgattatgccggaagctacccgtatgacgtgccagactacgctgggagcggagtcttcacgcttgaggatttcgtcggagattggcgacaaacggccggatacaatctggaccaggtgttggagcaaggtggcgtgtcttccctcttccagaacctcggcgttagcgtcacgcctattcaacgaattgtgctcagtggtgagaacggcctgaagatagacatccatgtcattattccttacgagggcctctctggcgatcagatgggacaaatcgaaaagatcttcaaggtggtgtacccggtcgacgatcaccactttaaggtgatattgcattatggaacgctcgtgattgatggagtcacacctaatatgatcgactacttcggcagaccctatgagggaatcgccgtctttgatggcaagaagataacagtaactgggacattatggaatgggaacaaaatcatcgatgagagactcataaatccagacggctccctgctctttagggtaactatcaatggcgtgactggatggaggctgtgcgaacgcatattagcctaa

SEQ ID NO: 295 - DNA, 621 bp, Artificial Sequence
  Modified Open Reading Frame
atggcagtttacccttacgacgttccagactacgcagggtatccttacgatgtgcccgactacgccggatcatatccctatgatgtcccggactacgccggaagcggtgtgttcacacttgaagactttgtaggtgattggagacagaccgctggttataatctagaccaggttctggaacagggtggtgtgtcttctctattccaaaacctgggtgtctctgttactccaattcagagaatcgtgctatccggtgaaaatggtttaaagattgacattcatgtaataatcccatacgaaggcttaagcggcgaccagatgggccaaattgagaaaatattcaaggtcgtttacccagtggacgatcaccacttcaaggtaatcttacattacggcacccttgtgattgatggcgttactccaaatatgatagactactttggccgaccttacgaagggattgccgtatttgacggcaagaaaatcacggtgaccgggaccttgtggaacggcaacaagattatcgacgagagattgattaacccagatggcagtctattgttcagggtaaccatcaacggcgtcacaggatggcggttatgcgaacgcatactagcgtaa

SEQ ID NO: 296 - DNA, 621 bp, Artificial Sequence
  Modified Open Reading Frame
atggccgtatacccttacgatgtgccggattacgccggatatccctacgacgtcccagattatgccgggagctacccatacgacgtacccgattacgccggttccggcgtcttcactttagaagacttcgtcggagactggcgccagacggctggttacaatctggaccaggttctagaacagggaggtgtttcttctctgttccagaacctgggagtctcggtaacacctattcagagaatagtcctcagcggagaaaatggactaaagatcgatattcacgtaattatcccatacgagggattatccggcgaccagatgggacagattgaaaagatatttaaggtcgtgtacccggttgatgatcatcatttcaaggttattctgcactatggaactctggtgattgacggtgttacgccgaatatgatcgattatttcggtcgtccgtatgaagggattgccgtcttcgacggcaagaagattactgtgacgggtaccttgtggaatggaaacaaaataatagacgagcggctaatcaatccggacgggagcctgttatttcgggttaccatcaacggtgtcactgggtggcgtctgtgcgagcgcattctagcctaa

SEQ ID NO: 297 - DNA, 621 bp, Artificial Sequence
  Modified Open Reading Frame
atggccgtctacccttacgacgttcccgactacgccggatacccgtacgacgtgcccgattatgcgggttcctatccctatgacgtcccagactatgcagggagcggtgtatttacactcgaagatttcgtgggcgattggcgtcagaccgctgggtataacttggatcaggtgttggagcaaggcggcgtgagttctttgttccagaacttgggagtctcggtgactccaattcagcgcatcgtgttgtcgggtgagaatggcctgaagattgatatccacgtcattatcccgtatgaaggcttaagcggcgatcaaatgggccagattgagaaaatctttaaagtagtctaccctgtagatgatcatcactttaaggtgatccttcactacgggactttagtgatcgatggagtcactcccaacatgatcgattatttcggccggccctacgagggaattgcagtctttgacgggaagaagatcactgtaaccggcacactgtggaacggcaacaaaatcatcgatgaacgcctgattaatccggatggctcattactattcagggtgacgattaatggtgttaccggctggcgcctctgcgagcgcatcctggcataa

SEQ ID NO: 298 - DNA, 621 bp, Artificial Sequence
  Modified Open Reading Frame
atggcagtgtatccctatgacgtgcccgactacgcaggctatccctacgacgtcccagattatgctggatcctatccgtatgatgtgcccgattatgccggcagcggagtatttacactggaagacttcgttggcgactggcggcagacagcgggttacaaccttgaccaggttctggaacaaggtggtgtgtccagtctattccagaatctcggcgtgagcgtgactccgatacagagaattgtgctcagcggtgaaaacgggttgaagatcgatatccatgttatcattccctatgaaggactctctggtgaccagatgggacagatcgagaagatcttcaaggttgtgtatccagtggacgaccaccactttaaagttattctgcactacggcaccctggtgatagatggcgtgacgccgaacatgatagactactttgggcggccctacgagggcatcgctgtcttcgatggcaagaagatcactgtcacgggcacgctctggaatggaaacaagattatcgacgagaggctaatcaatccggatggatctctgctctttcgtgtgacgatcaatggtgtgaccgggtggaggctctgtgagagaatcctcgcctaa

SEQ ID NO: 299 - DNA, 621 bp, Artificial Sequence
  Modified Open Reading Frame
atggctgtgtacccgtacgacgtgccggactacgccggctacccgtacgatgtgcctgactacgcgggctcatatccctatgatgtgccagattacgccgggagtggtgtgttcacattggaggatttcgttggcgattggcgccagacggctggatataatctggaccaagtcctggagcaaggaggagtctccagtctctttcaaaaccttggagtaagtgtaactccaattcaaaggattgtactctctggtgaaaacggattgaagattgatattcatgttattatcccatacgagggcctatcgggagaccagatgggccagatcgagaagatcttcaaggtcgtctacccagtcgatgatcatcatttcaaggtgatccttcactacgggaccctagttattgacggtgtcacgcccaatatgattgattacttcggtagaccctatgaagggattgcagtatttgacggtaagaaaatcactgtgacagggactttgtggaatgggaataagataattgacgaaaggctgatcaacccggacggatcgttgctgtttcgggtcactatcaacggtgtcacaggctggaggctgtgtgaaaggatcttggcctaa

SEQ ID NO: 300 - DNA, 621 bp, Artificial Sequence
  Modified Open Reading Frame
atggccgtgtacccatacgacgtgcccgactatgctggatacccttacgatgtcccggattacgcaggatcatatccatacgatgtcccagattacgcaggcagcggcgtcttcacacttgaagatttcgtgggagactggagacagaccgctggctataatctggatcaagtgttggaacagggtggtgtgtcctctctctttcaaaacctgggagtaagcgtcacgccgatacagagaatagtgttaagcggcgaaaacgggctcaaaatcgatatacacgtgattattccgtatgaaggcctttccggagatcaaatgggccagattgagaagatattcaaggttgtctatcccgttgatgatcatcactttaaggtcatccttcattatggtacactagtgatcgacggagtgactccgaacatgatcgactacttcggtcgtccatatgagggcattgctgtgttcgatggcaagaaaatcaccgttacagggaccctgtggaacggaaataagatcatcgatgaaagactgatcaaccctgatgggagcttactgttcagggtaactatcaacggtgtgaccgggtggagattgtgcgagagaatcttagcttaa

SEQ ID NO: 301 - DNA, 621 bp, Artificial Sequence
  Modified Open Reading Frame
atggcagtgtatccttacgacgtgcctgactatgcaggatacccgtacgacgtaccagattacgccggttcgtacccgtatgatgtaccagactatgcaggatccggcgtctttacgttagaagatttcgttggagactggaggcagacagccgggtacaacttggatcaggtgttagaacaaggtggcgtgagcagcctatttcagaacctcggagtttcggtaacacctatccagagaattgtgctgtccggcgaaaacgggttgaaaattgacatacatgttatcatcccgtacgagggcctgtcgggtgatcagatgggtcagatcgagaagatcttcaaggtagtctaccctgtcgacgatcaccacttcaaggtgatcctccactacgggacactggtaatagatggcgtaacgcctaacatgatcgactacttcggaagaccttacgagggtatagctgtcttcgacgggaagaagatcaccgtcaccggaacattgtggaacggcaataaaattattgatgaacgactgattaacccagacggtagcctactcttcagagtcacaattaacggcgtcacaggatggcggctctgtgaacgtatcctagcgtaa

SEQ ID NO: 302 - DNA, 621 bp, Artificial Sequence
  Modified Open Reading Frame
atggcagtctacccatatgatgtacctgactacgctggatacccatacgatgtaccagactacgctggaagttatccttacgatgtgccggattacgccggttccggtgtgttcaccctggaggacttcgtaggcgattggcggcagaccgccggatataatcttgaccaggttcttgaacagggcggagtgtcgtctctgtttcaaaacttgggcgtgagcgtcacacccattcagagaatagtactgagtggagagaatggcctcaaaattgatatccacgttattattccgtacgaaggtctgtctggagatcagatgggccagatcgagaagatcttcaaggtagtctacccagtggatgaccatcatttcaaggttatcctacactacggcactctagtgattgatggtgtgactcccaacatgatcgattacttcggaagaccttatgaaggcatcgcggtgttcgatggaaagaaaatcactgtcacaggaactctgtggaatgggaacaagatcattgatgaacggctgatcaacccggatggatcattgctgtttcgggttacgatcaatggcgttacaggctggcgcctgtgcgagaggattctcgcgtaa

SEQ ID NO: 303 - DNA, 621 bp, Artificial Sequence
  Modified Open Reading Frame
atggctgtgtacccgtatgatgtccctgactacgctgggtatccctacgatgtacccgactatgccggatcttatccgtatgacgtcccagactatgctggttcaggcgtgttcacgcttgaggactttgtcggtgattggcggcagaccgcgggttataatctggaccaggtcttggaacaaggaggtgtttcctcactcttccaaaacctaggagttagcgtgacaccaatccaacgtatagtcttgtccggagagaatggactaaagatagatattcacgtgatcataccgtacgagggtctgtctggcgaccagatgggacagattgagaagatcttcaaggtcgtgtaccctgtggatgaccaccatttcaaggtcatcttacattacgggaccctggtaatcgacggagtaacaccaaatatgattgactactttggaaggccctatgaagggatagccgtcttcgatgggaagaagataacagttacgggcaccttatggaatggaaacaagattatcgacgagcgcctgattaaccctgatggttcacttctgttcagagttacaatcaacggtgttactggatggcgcctgtgcgaacggatccttgcctaa

SEQ ID NO: 304 - DNA, 621 bp, Artificial Sequence
  Modified Open Reading Frame
atggccgtgtatccatacgacgtaccggactacgccgggtacccgtacgacgtaccggattatgccggctcatacccttatgatgttccagactacgctggcagcggtgtgtttacactagaggactttgttggcgattggaggcagactgccggatataacttagatcaggttctcgagcagggaggagtttcttcactcttccaaaatctgggcgtttcggttactccaattcaaaggattgttctgtcgggagaaaacgggttgaaaatagacatccacgtaatcattccgtacgagggtttaagcggtgaccagatgggccaaatcgagaagatctttaaagtcgtatatccggtggatgatcatcatttcaaggtcatcctgcattacgggaccctcgtgatcgacggcgtaactcctaatatgatcgattatttcggtagaccttacgagggcattgcagtgttcgatgggaagaaaattactgtcactgggactttgtggaacggtaataagataatcgacgagagacttatcaatccggacggctccctgctgtttcgggtcacgataaacggagtgactgggtggaggctgtgtgaacgcattctcgcataa

SEQ ID NO: 305 - DNA, 621 bp, Artificial Sequence
  Modified Open Reading Frame
atggctgtatacccttatgacgtgcccgactatgcaggatacccatacgacgtccctgactatgcagggagttacccttacgacgtgccggattacgcaggctcgggagtcttcacactggaagatttcgtcggtgactggcgacagaccgcaggatataacctcgaccaggttctggaacagggtggcgtgtcatcgctgtttcagaacctgggagtgtcagttacgcctatacagcgtattgttctttccggagagaatgggttgaaaatagacatacacgtgatcataccctatgaagggctgtcgggagatcagatgggccagatcgagaaaatctttaaggtcgtgtatcccgtcgatgaccaccacttcaaggtgattctccattacggcaccctcgtgatagacggcgtgactccaaatatgatcgactatttcggtaggccgtacgaagggattgctgtatttgacggaaagaagattactgtgaccggaaccttatggaatggtaataaaatcatcgatgaaagactcatcaaccctgatggctccctgctgttcagagtcacaatcaacggagtgaccggatggaggctctgcgagcgaatcctggcttaa

SEQ ID NO: 306 - DNA, 621 bp, Artificial Sequence
  Modified Open Reading Frame
atggcggtttatccttacgatgtgccagactacgcgggctatccatacgatgtgcccgactatgcagggagctatccctatgatgtgcccgactacgctggtagtggagtatttacgttagaggacttcgttggcgattggaggcagaccgcaggctataacctggatcaggtcctcgaacagggaggcgtctccagtctctttcagaatctgggcgtgtctgtgacaccaatacaacgaatcgttctgtctggcgagaatggactaaagattgacatccacgtgatcattccctatgaaggcctgtctggagatcagatgggacagatcgaaaagatctttaaggtggtgtacccagtggatgaccatcacttcaaagttatcttgcattatggtacactggtaatcgatggagtaactcctaacatgatcgattacttcgggcggccctacgagggaatcgctgtattcgacggtaagaaaatcactgtgactggaacgctttggaatggtaataaaatcatcgacgaaagactgattaaccctgatggttccctgctgttccgagtcaccataaatggagtcaccggctggcgcctatgtgaaaggatactcgcctaa

SEQ ID NO: 307 - DNA, 621 bp, Artificial Sequence
  Modified Open Reading Frame
atggcagtgtacccatacgatgtacccgattatgctggctatccctatgatgtgcccgactatgctggatcttatccatatgatgtaccggactatgcagggagtggtgtgtttaccctagaagactttgttggtgactggcggcagactgccggatacaacctagaccaagtgctcgagcagggcggcgtttcatctttgttccagaaccttggcgtatcggtgacacccatccagcgcatagtcctttccggcgaaaatggccttaagatcgacattcatgtaatcataccatacgagggcctgtcaggcgaccagatgggacagatagaaaagatattcaaggtcgtatacccagttgatgaccatcacttcaaggtgatccttcactacggcactctcgttatagacggcgtgactcctaacatgatagattactttggccggccctacgagggtatcgcggtattcgacggcaagaaaattacagtgaccgggacgctttggaacggcaataagatcatcgacgaaagactcataaacccagacggcagcctgctctttcgagtcacgattaacggtgtcaccggttggaggttgtgcgagagaatcttggcataa

SEQ ID NO: 308 - DNA, 621 bp, Artificial Sequence
  Modified Open Reading Frame
atggccgtctatccctatgacgtgccagactacgccggttacccttacgatgtgcctgactatgctggtagttacccttacgacgtaccggactacgccggcagcggtgtgtttaccttggaggatttcgtgggcgactggcgtcagacggctggctataatctcgatcaggtgctcgaacaaggcggagtctcttctctctttcagaatctaggagtaagcgtcacacccattcagagaatcgtgttatcaggcgaaaacgggctaaagatcgacatccatgttattattccttatgaagggctcagtggtgaccaaatgggccagatagagaaaatattcaaagttgtttatcctgtggatgaccatcatttcaaggttatcctgcactacggaactctggtgatcgatggtgtgacgcctaacatgatcgactactttggacgtccctacgaaggcatcgcagtattcgacggcaagaagattactgtcaccggcacactatggaacgggaataagattattgatgaacgtctaatcaatcccgatggctctttgctcttcagggtcaccatcaacggcgtcaccggctggagactgtgtgagcgtattctggcctaa

SEQ ID NO: 309 - DNA, 621 bp, Artificial Sequence
  Modified Open Reading Frame
atggccgtgtatccttacgacgtgcctgattatgctggatacccgtacgatgtgcccgattatgccggcagctatccatatgacgtgcccgactacgctggaagtggagtgttcactctggaggatttcgttggagattggcgtcagacagcaggctataatttggaccaagtgttagagcaaggcggcgttagttctctgtttcagaacctaggagtaagtgtgactccgattcaaaggattgtgctgagcggtgagaatggtttaaagatagacatacacgttattataccctacgaaggtttgtctggcgaccagatgggacaaattgaaaagatcttcaaagtagtatatccagtcgacgaccaccactttaaagtcatactgcactatggcactcttgtaatcgatggtgtaacgccgaatatgattgactacttcggaagaccctacgagggcatcgccgtgttcgacggaaagaaaatcactgtgacgggtacattgtggaacggaaataaaataattgacgagagactgatcaacccagacggaagcctgctgtttcgcgtgactattaacggagtgactggctggcgcctgtgtgagcgaatactggcttaa

SEQ ID NO: 310 - DNA, 621 bp, Artificial Sequence
  Modified Open Reading Frame
atggccgtgtacccatacgacgtgccagactacgccggatacccttacgacgtgccggattatgcagggagctacccgtatgacgtaccggactacgccggttctggcgtgtttacacttgaagactttgtgggcgactggcggcagaccgctggatataatctggatcaagtgctagagcagggtggagtcagcagtctgttccagaaccttggagtgtctgtgacgccgatacagaggatcgtgctttccggagaaaatggacttaaaattgacatacatgtaatcataccatatgagggtctgtcaggtgaccagatgggacagattgagaaaatcttcaaggttgtgtacccagttgatgatcaccactttaaagtcattctgcattacggaaccctggttattgatggagtcactcccaatatgatcgactactttggaaggccttacgagggcatagccgtgtttgatggcaagaagataactgtgaccggcaccttgtggaatgggaataaaattatcgacgaaaggcttattaatccagacggcagtcttctctttcgtgtgacaatcaatggcgtgactgggtggcggctttgcgaaagaattctcgcataa

SEQ ID NO: 311 - DNA, 621 bp, Artificial Sequence
  Modified Open Reading Frame
atggccgtgtatccttacgacgtgcctgactatgctggttacccttatgacgtgcccgattacgctgggagttacccatacgatgttccagattacgcagggagtggcgtgtttactcttgaggactttgtaggtgattggcgtcaaactgccggctacaatctcgaccaggttctcgaacagggcggcgtgagttcactattccaaaacctgggtgtgtctgtcacgcctatccagagaatcgtattatccggcgaaaatggcctcaagatcgatatccacgtgattattccctatgaagggctgtctggcgaccagatgggacaaattgagaagatattcaaagtagtgtatcctgtggatgatcaccactttaaagttatcctgcattacggtactttggtgattgacggagtgactccaaatatgatagactactttgggagaccttacgaagggatcgctgtcttcgatggaaagaaaataaccgtgacgggtacgctgtggaatggcaataagattatagacgaacgactcatcaatccagacggtagcttgctctttcgtgtgacgatcaatggcgtgacgggatggcggctttgcgaaaggattctggcctaa

SEQ ID NO: 312 - DNA, 621 bp, Artificial Sequence
  Modified Open Reading Frame
atggctgtatacccgtatgacgtgccggactatgctgggtatccatacgacgtgcccgactatgctgggtcatacccatacgacgttcccgactatgccggctcgggcgtatttaccttagaagactttgtcggcgactggcgccagactgcaggttataatctggatcaggtccttgaacagggtggcgtgagtagtctctttcaaaacctgggagtctccgtgacgcccatccaacggatagtgctgtctggcgagaatggactgaaaattgatattcatgtaattataccctacgaagggttgtcgggagatcagatgggtcagatcgagaaaatattcaaggtcgtctacccagtggacgaccatcatttcaaggtcatcttacactatggcacactggtaatcgatggcgttacacctaacatgattgactatttcggccgaccttacgagggcattgcggtgttcgacggaaagaaaattacagttacaggcaccttatggaacggcaacaagattatagacgagcgcctgataaacccggatggatcgctgctgtttagagtgaccataaacggagtgaccgggtggaggctttgcgagcgaatattggcttaa

SEQ ID NO: 313 - DNA, 621 bp, Artificial Sequence
  Modified Open Reading Frame
atggctgtgtacccgtatgatgtgcccgactacgctgggtatccctacgatgtgcccgactacgcagggagttatccctatgacgtgccagactacgccggatcaggcgtgttcactttggaggactttgtgggtgactggcgccagaccgcgggttacaacttagatcaggtgctcgagcagggcggagtgagctctctcttccaaaacctgggcgtgagtgtcacacctattcagcgcatagtcctaagcggcgaaaacggactcaagatcgacatccatgtgattatcccgtacgaaggactgagtggagatcaaatgggtcaaatagagaaaatcttcaaggtggtgtaccctgttgatgaccaccacttcaaggtgattcttcactacggtacactggtgatagatggtgtgactcctaatatgatcgattacttcggaagaccttacgagggcattgcagtgtttgacgggaagaagatcaccgttactggcaccttatggaatgggaacaagattattgacgagcgactcatcaacccagacggatctctgctgttccgggtgactataaatggtgtcaccggttggaggctgtgtgaacgcattcttgcataa

SEQ ID NO: 314 - DNA, 621 bp, Artificial Sequence
  Modified Open Reading Frame
atggcagtctacccgtatgatgtcccagactatgccggatatccatatgacgttcccgattatgccggatcctatccttacgatgtgcctgactatgctggctctggagtgttcacgctagaggactttgtcggagattggagacaaaccgccgggtacaatctggatcaagtgctagagcagggcggagttagcagtctcttccagaacctgggtgtctctgtgacacccattcaacgaatcgttctatccggcgaaaacgggctaaagattgacattcacgtcattattccctacgagggtcttagtggtgaccagatgggccagattgaaaagatatttaaagtggtgtaccctgtggacgatcaccacttcaaggttatcctccactacgggaccctagtcatagacggcgtcacacctaacatgattgattatttcggaagaccttacgagggtatcgccgtgtttgacggcaagaaaattactgtgactgggaccctgtggaacggcaataagatcatagatgaacgactcattaatcccgatgggagtttgctctttcgagtgacaataaacggcgttacaggctggcgactatgtgagcggatcctcgcataa

SEQ ID NO: 315 - DNA, 621 bp, Artificial Sequence
  Modified Open Reading Frame
atggcagtgtacccttacgatgttccagactatgcaggatatccctacgacgtgcccgattacgccggaagctacccatacgatgtccctgactacgccggcagtggagtgtttaccctggaagatttcgtgggcgactggagacaaaccgccgggtataatctagatcaggtactggagcaaggcggtgtcagctccctctttcaaaaccttggcgtgagtgtgacaccaattcaacggattgtgctttctggcgagaacggattaaagatagacattcatgtaatcatcccatatgagggcctgagcggcgaccagatgggccagatcgagaaaatcttcaaggtggtttacccggttgacgaccaccacttcaaagttatattgcactatggaacactcgtgatagatggcgtgacgccaaatatgatcgattatttcggtcggccatacgagggtattgcggtgttcgatggaaagaaaattacagttaccgggaccttatggaacggtaataaaattattgatgagagattgattaatcctgacgggtccctgctattccgcgtgaccatcaacggcgtgacagggtggaggctttgcgaaagaattctggcctaa

SEQ ID NO: 316 - DNA, 621 bp, Artificial Sequence
  Modified Open Reading Frame
atggcagtgtatccttatgatgtgcccgattatgccgggtacccttatgacgttccagattacgcaggatcttatccctacgacgttcccgattatgctggctctggcgtcttcactcttgaggacttcgttggtgattggagacaaacagctggctataacctggaccaggtactcgagcagggcggagtgtcttcactgtttcaaaacctaggcgttagcgtgacacccattcagcggattgtgctctccggtgagaacgggctcaaaatcgatatacacgtgatcatcccgtatgaaggcctgagtggagatcaaatgggccagattgaaaagatcttcaaggttgtttaccctgtggacgatcaccatttcaaggtcattcttcactacgggaccctagttattgatggcgtgactccaaatatgatcgactatttcggtcggccttatgaaggaatcgctgtattcgacggtaagaagattactgttactgggacgctgtggaacgggaacaagatcatcgatgaacggctgatcaaccctgatgggagcctgctgttccgagttacgatcaacggagtgaccggatggcgattgtgtgaacgaatcttagcttaa

SEQ ID NO: 317 - DNA, 621 bp, Artificial Sequence
  Modified Open Reading Frame
atggccgtttacccatacgacgtacccgattatgctgggtatccgtacgacgtgccagattatgccggcagctacccttacgacgtgcccgactatgcaggcagcggagtctttacattggaggatttcgtgggcgattggcgccagacagccggatataaccttgaccaagtgctggagcagggcggagtctctagtctgttccagaatctcggagtctctgtgactcccatccagcgcatagtcttatctggcgagaatggactgaagatcgacattcacgtcatcatcccgtatgagggcctcagcggcgaccagatgggtcagatcgagaagatattcaaggttgtctatcccgttgacgatcaccactttaaggtgatcctccattatggcactctggtaatcgacggtgtaacaccgaatatgatcgactactttggaaggccatacgaagggattgccgtattcgacggcaagaaaatcaccgtaactggaaccttgtggaacgggaataaaataatcgatgaacggttaataaatccagacggatcgcttctgttccgggtgacaattaatggcgtgacaggttggaggctctgtgagcgcatccttgcgtaa

SEQ ID NO: 318 - DNA, 621 bp, Artificial Sequence
  Modified Open Reading Frame
atggctgtgtatccatacgacgtgcccgactacgcaggatacccgtatgacgtgcccgactatgccggcagctatccctacgacgtgcccgactacgccggaagtggtgtcttcactttggaggacttcgtgggcgactggaggcagacagcgggttacaatctcgaccaggttcttgaacaaggcggagtgtccagcctgttccagaacctaggagtatctgtcacaccaatccagcgtatcgtgctctctggtgagaatggtttgaagatagacatacatgtcatcatcccttatgaaggcctttccggcgatcaaatgggtcagatcgagaaaatctttaaggtcgtgtatccggtggatgatcatcacttcaaagtcattctacattacggtacattggtgatagacggcgtgactccaaatatgatcgattacttcggccggccatacgaaggcatcgccgtatttgacggaaagaagatcacagtgacgggtaccttatggaatggcaacaagattattgacgaaaggctcatcaatccagacggttctctgctcttccgcgttacaattaatggtgtgactgggtggcggctctgtgagcggatcttggcctaa

SEQ ID NO: 319 - DNA, 621 bp, Artificial Sequence
  Modified Open Reading Frame
atggcggtgtatccttacgacgtgcctgattacgcaggctatccttacgacgtacccgactatgccggtagctatccctacgatgtgcccgattatgcgggatcaggcgtgtttactctggaagactttgttggcgactggcgacaaaccgcaggctacaaccttgatcaggtgttggagcagggaggtgtgtcaagtctgtttcagaatttaggcgttagcgttacacctatccagagaatcgtgctgagtggcgagaatggcctgaaaatagacattcatgtcattataccctatgaaggactcagcggagaccagatgggacagatagagaagatcttcaaagtggtgtacccggttgacgatcatcacttcaaggtgatactccactacggaacattggtcattgatggtgtgacacctaatatgatcgattatttcggtcggccttacgaagggattgcggtatttgatggcaagaaaatcaccgtgaccggtactttatggaatggtaacaaaatcatcgacgaaaggttgatcaacccagacgggtcccttctgtttcgcgtgacaatcaatggcgttaccgggtggcgactgtgcgaacgtattctagcttaa

SEQ ID NO: 320 - DNA, 621 bp, Artificial Sequence
  Modified Open Reading Frame
atggccgtttatccatacgacgttccagactatgcgggatatccgtatgatgtgccagactatgctggcagctatccctatgacgttcctgattatgcaggtagcggcgtgttcacactagaggactttgtcggcgactggcggcagacagcaggatataaccttgatcaggtactcgagcaaggcggagtttcttccctgttccagaaccttggtgtgtccgtcacacccatccaacgcattgtgctgtcgggagaaaacgggctgaagattgatattcatgtcatcataccatacgagggcttgtcaggtgatcagatgggccaaatcgagaaaatatttaaggtggtttacccagtggatgaccatcacttcaaggtcatactccactacggtacactggtgattgacggcgtgacacctaatatgatcgattactttggccgtccctatgaagggatcgccgtcttcgatggtaagaaaataacggtgaccgggactctttggaacgggaataagattatcgacgaacgccttatcaatcctgatggctcgcttctctttagggtgaccatcaatggagtgacaggctggcggctctgcgagcgaatactcgcctaa

SEQ ID NO: 321 - DNA, 621 bp, Artificial Sequence
  Modified Open Reading Frame
atggccgtgtacccgtatgacgtgccggactacgcgggctacccatatgacgtaccagactacgccggcagctacccgtatgatgttccagattatgccggctctggcgtgttcactttggaagacttcgtcggcgactggcgacagacagccggatataacctggatcaggtattggagcagggaggtgttagctcactctttcagaatctcggcgtatccgttacaccgatccagagaatcgtgctgagtggcgagaacggccttaaaatcgacatccatgtcataatcccatatgaagggctcagcggcgatcagatgggccagattgagaaaatctttaaggtggtatacccagtggatgatcaccatttcaaagtgatcttgcactatggaacattagtgattgacggagtcactccgaatatgattgattactttggaagaccctacgagggcatagccgtctttgacgggaagaagatcacggttacaggaactctgtggaatgggaacaagattattgacgaacgactcatcaatcctgacgggtcactcctcttccgggtcaccattaacggtgtgaccggatggaggctgtgcgagcggatactggcataa

SEQ ID NO: 322 - DNA, 621 bp, Artificial Sequence
  Modified Open Reading Frame
atggccgtctacccatatgacgtgcccgactacgcaggctacccatatgatgttcctgattatgcagggtcatatccatatgatgtgccggattacgccggatccggagtgttcactttagaagactttgtgggagactggaggcagacagctggatacaacctcgatcaggtccttgagcagggaggagtcagctccttgttccagaatctcggcgtcagcgttactccaatacaacgtatcgtgctttccggcgaaaacggcctgaagatcgatatccacgttatcatcccttatgagggcctgagtggcgaccagatgggccaaattgaaaagatattcaaggtcgtttatcccgtagatgaccaccacttcaaggtgatactgcattatgggactttggttattgatggcgtgacaccgaacatgatagactactttgggcgcccatatgaaggcatcgctgtatttgacgggaagaagatcacggtgacaggtaccctgtggaatgggaacaagattatcgacgagcgactcattaatcctgacggttcgctcctgttccgcgttacaatcaatggcgtgaccgggtggagattgtgtgagagaattctggcgtaa

SEQ ID NO: 323 - DNA, 621 bp, Artificial Sequence
  Modified Open Reading Frame
atggccgtatatccgtatgatgtgccagattacgctggctatccctacgatgtgccagactacgcagggagctatccttatgatgtgcccgactacgccggttccggtgtcttcacactcgaggactttgtgggagactggaggcagaccgccggttataatctggaccaggtgctggaacagggcggcgtttcgtccctgttccagaatctgggagtatccgtgacgccaattcagcgcattgtcctgtccggagagaatggactgaaaattgacattcatgttatcatcccgtacgaaggactgtcaggagaccagatgggccagatagaaaagatcttcaaggttgtctacccggtagacgatcatcactttaaagtgatcctccactatggaacgttggtgatcgacggcgttacaccaaatatgattgattacttcggacgcccttatgaagggatcgccgtgttcgatgggaagaaaatcaccgtcacaggcaccctgtggaatgggaataagatcatcgacgaacgactaatcaatcccgatggctcactgttatttagggtaactatcaatggcgtaacaggctggcgactgtgcgaaaggatactggcataa

SEQ ID NO: 324 - DNA, 621 bp, Artificial Sequence
  Modified Open Reading Frame
atggcagtttacccatacgacgtgcctgactacgctggttatccttatgatgtccctgactacgccgggagctatccatatgatgtccctgattacgctgggagtggcgtgttcaccctggaggatttcgtgggagactggagacagactgcgggatacaacctcgaccaggtcttggaacaaggcggagtgtcctcactctttcagaatctgggcgtttctgtaactcctattcagagaattgtcctctctggtgaaaacgggctaaagatagacatccatgtgataataccttatgagggcctctcaggcgaccagatgggccagatagaaaagatcttcaaagttgtctacccagtcgatgaccaccacttcaaggtaatcctccactacggcactctggttatcgacggagtgactccgaacatgatagattatttcgggcgtccgtacgaaggaatcgcagtctttgacgggaagaaaatcacggtgacgggtaccctgtggaatgggaacaaaatcatagacgagcgcctcattaatccagacggctcactgctgtttcgggtcaccattaacggtgtgactgggtggcgattgtgcgaacgaattctggcataa

SEQ ID NO: 325 - DNA, 621 bp, Artificial Sequence
  Modified Open Reading Frame
atggcagtctacccttatgatgttcctgattacgcaggatacccatatgacgtacctgattacgccgggtcctacccatacgacgtgccggattacgcaggctctggagtgttcacattggaagatttcgtgggcgattggcgccagacagcgggctacaacttggatcaggtgcttgagcagggcggcgtgagcagtctgtttcaaaatctcggagttagcgttactccaatccagcgtatcgtactgagtggagagaacgggctgaagatcgacatccacgtaatcattccctacgaaggcctatctggagaccagatgggacagatcgaaaagatcttcaaggtggtatatcccgtagacgatcatcactttaaagtgatactgcattacggcacattggtgattgatggagtaacaccgaacatgatagattacttcgggcgcccatatgagggaatcgccgtattcgatggaaagaagataactgttacagggacactttggaatggaaataagataatcgatgagagactgattaacccggacggctcactgctatttcgtgtgactataaacggcgtaaccgggtggcgtctctgtgagagaattctcgcataa

SEQ ID NO: 326 - DNA, 621 bp, Artificial Sequence
  Modified Open Reading Frame
atggcagtctacccgtatgacgtacccgattatgccgggtatccctatgacgtcccagactacgcaggttcttacccatatgatgtaccagattatgccggttcgggtgtgttcaccctggaggacttcgtcggcgactggagacagactgccggatataacctggaccaggtcttggagcagggaggcgtaagctccttgttccaaaatctcggcgtctcagtgacacctatccaacgaattgtcctgtccggcgaaaacggcttgaagattgatatacacgtaatcattccctacgagggccttagcggcgaccagatgggccaaatagagaagatcttcaaggtggtataccctgttgacgatcatcatttcaaagttattctccattatgggactctggtgatagacggcgttactcccaacatgatcgactactttgggaggccttacgaaggcatagccgtattcgatggtaagaaaatcaccgtcactggtacgttatggaatggtaacaagatcatagatgagaggctgataaatcctgatggctcacttctgttccgggtaaccattaatggcgtaactggctggcggctgtgtgaacggattctcgcataa

SEQ ID NO: 327 - DNA, 621 bp, Artificial Sequence
  Modified Open Reading Frame
atggcagtgtacccatacgatgttcccgattacgctggctatccttacgatgtccctgattacgctggctcttatccctacgatgtgcccgattatgcaggcagcggcgtattcacgttagaagacttcgtcggcgactggcgccagaccgcaggatacaacctcgatcaggtgctggaacagggaggtgtatcctctctatttcagaacctcggcgtatccgtaacgcccatacaaaggatagtgctctctggcgaaaatggccttaagattgacatccacgtcatcattccctacgaaggtttatctggtgatcaaatgggccagatcgaaaagatcttcaaggtggtatatcccgtagacgatcatcatttcaaggtcatccttcattacggcactcttgtgatcgatggcgttactccaaacatgattgactacttcggtaggccatacgaaggaattgcggtgttcgacggtaagaagatcacggtaactggtacactatggaacggcaacaagattattgatgagagactcatcaatcctgatggatcactactgtttcgcgtgacaatcaacggcgtcacagggtggagattatgtgagagaatactcgcctaa

SEQ ID NO: 328 - DNA, 621 bp, Artificial Sequence
  Modified Open Reading Frame
atggcagtgtatccgtatgatgtgccagactacgccggttatccctacgacgtgcctgactacgccgggtcctatccctacgatgtgccagattacgccggtagtggtgtgttcaccctagaagactttgttggagactggagacagacagcgggttataacctagatcaggtgttagagcagggaggtgtaagtagtctctttcagaaccttggagttagcgttactccaatccaacggattgtgctcagcggtgaaaatgggctcaaaatcgatatccatgtcattatcccttacgaaggactgagcggcgatcagatgggtcaaatcgaaaagatcttcaaggtggtgtacccagtagatgatcaccacttcaaggtgatcctgcattatggaaccttggtgatcgatggcgttacgcctaatatgatcgactacttcggacggccatatgaaggtatcgcagtattcgatggcaagaagatcacagtcaccgggacactttggaacgggaataagataattgacgaaagattgataaacccggatgggtccctgctgttcagagtgaccataaacggcgtcacgggttggcgactatgcgagaggattcttgcttaa

SEQ ID NO: 329 - DNA, 621 bp, Artificial Sequence
  Modified Open Reading Frame
atggccgtctatccctacgatgttcctgactacgcaggctacccatacgacgtgcccgactacgcaggatcgtacccttatgatgtacctgactacgccggttcgggtgtgttcactctggaggactttgtcggagattggagacagacagcgggttacaatctggatcaagtcctggagcaaggaggcgtgtcgagtctgtttcagaacctgggtgtctccgtaactcctatccagagaatagttctcagtggcgagaatggcttaaagatcgatattcatgtgatcataccctacgaaggactgagcggcgaccagatgggtcagatagaaaagatcttcaaggtcgtctatcccgtagatgatcaccactttaaagtgatcttacattacggcacactggtaatcgacggcgttactcccaacatgatagactacttcggaagaccatatgagggtatcgccgtatttgacggcaagaagatcaccgtcacaggcacattgtggaatggcaataagattattgacgagaggctcatcaaccctgacggatctctcctgtttcgagtgacaatcaacggcgtcaccggctggcgcctgtgtgagcggattctggcgtaa

SEQ ID NO: 330 - DNA, 621 bp, Artificial Sequence
  Modified Open Reading Frame
atggcggtatacccgtacgatgtcccagactacgcagggtacccatacgacgtgcccgactatgctggctcctacccttacgacgtgccggactacgctgggagtggagtcttcacattggaggatttcgtgggtgactggagacagaccgccggttacaacttagatcaagtccttgagcagggcggtgttagtagcctattccagaacctgggagtgagtgtgactccgatccagcgtatcgttctttccggcgagaacggactaaagatagatattcatgtgatcattccttatgagggtttaagcggcgatcagatgggccagattgagaagatcttcaaagtggtgtatcccgtcgatgatcatcatttcaaggtgatcttacactacgggacgctggtcatagacggcgtgactccaaatatgatcgactatttcggccgtccttacgagggaatcgccgtatttgacggtaagaaaattacggttacgggaaccttgtggaacggtaataagattatcgacgagcggcttatcaatccggacggatctctcctgttccgggtaactataaatggcgtgaccggttggaggctgtgtgaacgtatcctcgcctaa

SEQ ID NO: 331 - DNA, 621 bp, Artificial Sequence
  Modified Open Reading Frame
atggctgtttacccatacgacgtgcccgactacgctggctacccatacgatgtcccagattacgccggctcctacccgtacgacgtgcccgactatgcagggtcaggtgtgtttaccctggaagatttcgtcggcgactggcggcagactgctggctataatctggaccaggtgctggaacaaggaggcgtgtccagtctgtttcagaacctgggcgtgtccgttacaccaattcaacgcattgtgctgtccggcgagaacggacttaaaatcgacatccacgtcatcattccatacgaagggctctctggagatcagatgggacagattgagaaaatctttaaggtggtatatcctgtcgatgatcatcactttaaggtcatattgcactacggcaccctggtgattgacggagtaacacctaatatgatcgactatttcggacggccttacgaaggaatcgctgtcttcgacggcaagaagataacagttaccggtacattatggaacgggaacaaaattatagatgagcgactgatcaatccagacggttctctactcttccgcgtcacaataaatggtgttaccggatggaggctttgtgaacgcatactcgcttaa

SEQ ID NO: 332 - DNA, 621 bp, Artificial Sequence
  Modified Open Reading Frame
atggcagtgtacccgtacgacgtgcccgactacgccggctatccttacgatgtcccagactatgcgggctcctacccatacgacgtgccagactatgcgggctcgggagtgtttacacttgaagacttcgttggtgactggcggcagacagctgggtacaatctggatcaagtcctcgaacagggaggcgtttcctctctgtttcagaacctaggcgtgagcgttacgcccatacaacggatagtgttgtcaggcgaaaacggtttgaagattgatatacatgtgattattccatacgagggtctcagcggagatcagatgggtcaaatcgagaagatattcaaggtagtgtatcctgtcgacgatcaccactttaaggtgatcctgcactacgggaccttggttattgatggcgtgacacccaatatgatcgactacttcggtagaccatacgagggcattgcagtcttcgacgggaagaaaattacggtcaccgggacgttgtggaacggaaataagattatcgatgaacgactaattaaccctgatggaagcctcctctttcgagtaactatcaacggtgtcactggatggagactttgtgagcggattctggcgtaa

SEQ ID NO: 333 - DNA, 621 bp, Artificial Sequence
  Modified Open Reading Frame
atggcagtgtacccttacgacgtacctgactatgccggctacccttatgacgtacctgattacgccgggagctatccgtacgacgtacctgactacgccgggtcgggagtattcactctggaagactttgtgggagactggagacagaccgcaggctacaatctggaccaggtcttggaacagggcggagtcagtagcctgtttcaaaatcttggagtctcagtaactcctatccaaaggatcgtactctcaggtgagaacggactgaagatcgatatccacgtcatcatcccgtacgagggcctctctggcgatcagatgggccaaatcgagaaaatatttaaggtcgtgtacccagtggacgatcatcatttcaaggtaattctccattacgggacactagttatcgatggagtcacacctaatatgatcgattacttcggacggccttatgagggcattgctgtgtttgatggcaagaaaattactgtgaccggcacactctggaatggaaataaaataatcgatgagcgtctcattaatccagacgggtcgcttctgttcagagtaactatcaacggcgtgaccgggtggcgtttatgtgagagaattcttgcttaa

SEQ ID NO: 334 - DNA, 621 bp, Artificial Sequence
  Modified Open Reading Frame
atggcagtgtacccttatgatgtgcctgattacgccggctatccttatgatgtacccgattacgctggctcctatccatacgatgtcccggactatgccggttcaggcgtgttcacactcgaggacttcgttggcgattggagacagaccgccggctataacctggaccaagtcctcgaacagggcggcgtgtcctcgctgttccaaaatcttggagtgagcgttacacctatacaacgcattgtgttgtccggcgaaaacggactcaagattgatattcatgtgatcattccatacgaagggctctcaggtgatcagatgggtcaaatcgagaagatctttaaagtggtttaccctgtggacgatcatcacttcaaagtaatcctccattatgggactctcgtcatcgatggcgtgacacctaacatgatcgactatttcggccgaccttatgaaggaattgctgtgtttgacggaaagaaaatcacggtgacagggaccttatggaacgggaataagatcattgatgaacgcctcatcaatccagacggctcgttattgtttcgtgtgactattaacggagtcacagggtggagactgtgcgaaagaatcctggcctaa

SEQ ID NO: 335 - DNA, 621 bp, Artificial Sequence
  Modified Open Reading Frame
atggcagtgtatccatacgacgttcccgattacgccggttatccatatgacgtacctgactatgcgggcagttatccctatgatgttccagactacgccggtagtggtgtcttcaccttggaagactttgttggcgattggcgtcagaccgccggatataacctggatcaggttctcgagcaaggcggagtctcttctctcttccaaaatctgggagtctcagttacgccaattcagcgaatagttctttcaggagagaatgggctaaagatcgatatccacgtaataattccatatgagggtcttagcggcgaccaaatgggacagatcgagaaaatatttaaagttgtatatccagtagacgaccaccacttcaaggttattcttcactatggtacgctcgtcattgacggagttacacctaacatgattgattactttggacgcccttacgagggaatcgccgtgtttgatggcaagaagattactgtaactggaacactctggaacggtaacaagattattgatgagagactgattaatccagacgggtctctgctgtttcgcgtaaccatcaacggagtcacagggtggcgcctgtgtgaacggattctggcttaa

SEQ ID NO: 336 - DNA, 621 bp, Artificial Sequence
  Modified Open Reading Frame
atggccgtatacccatatgatgttcccgattacgcagggtacccttacgacgttccagactacgcgggctcgtacccatatgatgtgccagattatgctggctccggcgtgttcacactcgaggatttcgtgggcgattggagacagacagccggctacaatttagaccaggtgctcgaacagggcggagtgagtagcctatttcaaaacctcggcgtttccgtcacgcccattcagcgcatcgtactgtcaggagagaacggacttaaaatcgacatccatgtgattattccttatgagggtttgtctggcgaccaaatgggccagatagaaaagatctttaaggttgtgtatcctgtggatgaccatcactttaaggtcattctgcactatgggacactggtaatagacggtgtgactcctaacatgattgattactttggccgcccttatgaaggtatcgccgtatttgatggtaagaagatcaccgtaaccggaaccttgtggaatggaaacaagataattgacgaacgactcatcaaccctgatgggtcgcttctctttcgagtgacaattaacggtgtcacgggatggaggctctgtgaaaggatcttagcataa

SEQ ID NO: 337 - DNA, 621 bp, Artificial Sequence
  Modified Open Reading Frame
atggccgtctacccttacgacgtgcccgattatgccggctacccatacgacgtgcccgattacgcgggatcatatccatacgatgtgcctgactatgctggatccggcgtctttacgttggaggactttgtcggagattggcgacaaactgccggatacaacttggaccaagttctagagcagggaggagtatctagcctctttcaaaacctgggagtcagcgtcacgcccatacagcgcatagtgcttagcggagagaacgggttgaagatcgacattcacgttatcataccgtatgaagggttgtctggtgatcagatgggacagatagagaagatcttcaaagtcgtgtacccagtcgatgaccaccactttaaggtgatccttcattacgggacgctcgtgatagacggcgtgacaccaaatatgattgattatttcgggaggccctacgaaggaatagccgtgtttgatggaaagaagatcaccgtcactggaacgctatggaacggtaataagatcatagacgagagactgataaatcctgacggttctctgctcttccgagtgactattaacggcgttaccggctggcggttgtgcgaaaggatcctcgcataa

SEQ ID NO: 338 - DNA, 621 bp, Artificial Sequence
  Modified Open Reading Frame
atggcggtctatccctacgatgtacccgattacgccggatatccctatgatgtacccgattacgccggtagctacccttacgacgtacctgattatgcaggatcgggagtatttactctggaggactttgtaggagactggcgccagacagccggttataatctggaccaggtactggaacaaggcggagtcagttcgctcttccaaaatctcggagtaagcgtgacacccattcagcgcatcgtcctgtccggtgagaatggcctgaagattgatattcacgtaatcatcccatatgagggattatccggtgaccagatgggtcaaatcgagaaaatatttaaggtggtctacccagtagacgatcaccacttcaaggtcattcttcactacggaactctcgttatcgatggagttactccgaacatgattgattactttggaagaccttatgagggaattgctgtctttgatggcaagaaaatcaccgtcacaggcactctttggaatggcaacaaaattatcgatgaaaggctcattaaccctgacggaagtcttctcttccgagtcaccattaatggcgtcaccgggtggaggctgtgtgaacggatcctagcctaa

SEQ ID NO: 339 - DNA, 621 bp, Artificial Sequence
  Modified Open Reading Frame
atggctgtgtatccgtacgacgttccggactacgcaggctatccatacgatgtgccagattacgccggatcctatccttacgatgtgccggactacgccggctctggtgtcttcacattggaggacttcgtcggagattggcgtcagaccgcgggctacaatctggaccaggtgctcgaacaaggaggcgtcagcagtctctttcagaacctgggtgtgagtgtgactccaattcagaggatcgtattatctggcgaaaacggcctcaagatagacatccacgtgatcattccttacgaaggactgtccggcgatcagatgggacaaatcgaaaagatcttcaaagttgtctatcccgtggatgatcatcacttcaaagtcatattgcattatgggactcttgtgatcgacggcgttacgccgaacatgatagactactttgggcggccttacgaaggtattgcagtctttgacggaaagaagatcaccgtgacagggaccttatggaatggaaacaagatcatcgatgagcgactcattaatcctgacggatcactcttgttcagagtgacaattaatggcgttacagggtggagattatgcgagaggattcttgcttaa

SEQ ID NO: 340 - DNA, 621 bp, Artificial Sequence
  Modified Open Reading Frame
atggcggtttacccatatgatgtgccggactatgcgggttacccttatgacgtgccagattacgccggatcatacccttacgacgtgcctgattatgcaggcagcggcgtcttcactttagaggacttcgtaggagattggcgacagactgctggttataatcttgatcaggttctggaacaaggaggtgtttcctcattgtttcagaacttgggcgtctctgtgacacctattcaacggattgtgctttcaggcgaaaacggccttaagatcgacattcacgtgataatcccatatgaaggattgtcaggagaccagatgggccagatcgaaaagatcttcaaagttgtgtacccggtggatgatcaccatttcaaagttatcctccactacgggactcttgtaatagacggtgtgacacccaacatgattgactatttcggccgcccttacgagggaatagcggtatttgacggaaagaagatcaccgtgaccggtactttgtggaatggaaacaagatcatcgatgagcgactcataaatcctgacggatccctcctgttcagagttacaataaacggtgttacaggctggagactctgcgaaaggattctcgcctaa

SEQ ID NO: 341 - DNA, 621 bp, Artificial Sequence
  Modified Open Reading Frame
atggcggtatatccctatgacgttcccgactatgccgggtatccgtacgacgttcctgactatgctggatcatatccttatgacgtcccagactatgccggatccggtgtcttcactttagaggactttgttggtgattggaggcagactgctggctacaacttggatcaagtactggaacagggtggagtctctagcttatttcaaaatttgggtgtcagtgtaacaccaatccagaggatagtgctttcgggagagaacggccttaaaattgacatccacgttatcatcccatatgagggccttagcggcgatcaaatgggtcagatcgagaaaatcttcaaagtggtgtatcccgttgacgaccaccacttcaaagtgattctccactacggcaccctcgttatcgacggagtcacgccgaatatgatcgattactttgggaggccatacgagggcattgcagtgtttgacggaaagaaaatcacagtcactggaactctgtggaatggaaacaagattatcgacgaacgcttaataaatcccgacggtagtctcctgtttcgggttactataaacggagtgaccggctggaggctttgcgaacgcatcctagcctaa

SEQ ID NO: 342 - DNA, 621 bp, Artificial Sequence
  Modified Open Reading Frame
atggcagtgtatccctacgacgtaccagattacgctggctatccttatgatgtgcccgactatgctggttcttacccgtatgatgtcccagattatgccgggtcaggagtcttcaccctggaggacttcgtaggagattggcgccaaaccgccggctataatttagaccaggtcttagaacaaggtggcgttagctctctctttcagaacctgggagtctcagttacacccatccagcgcatcgtgttgagcggcgaaaatggcctgaaaatcgacatacatgtcattataccctatgaaggattatctggtgaccagatgggtcaaatcgagaagatcttcaaagtggtatacccggtggatgatcatcatttcaaagtgatcttgcactacggcaccctcgtcatagatggtgtaacacccaatatgatcgattatttcggcagaccttacgaagggatcgccgtctttgacggcaagaagatcaccgtaacaggaaccctgtggaatgggaataagattatcgacgaaaggttgattaatccggatggcagcctgctctttcgtgtgacaattaacggagtcactggttggcgactctgtgagaggattctcgcataa

SEQ ID NO: 343 - DNA, 621 bp, Artificial Sequence
  Modified Open Reading Frame
atggccgtgtacccatacgacgtgccagattacgcgggctatccatacgacgtccctgattacgccggctcgtacccttacgatgtacccgattacgcgggctcaggagtctttacacttgaagactttgtcggtgattggcggcaaacggcgggatataacctggaccaggtactggagcagggtggcgtgtcatcgctgtttcaaaatttaggtgtttctgtaacaccaattcaacgaatcgtgctctcaggagaaaacggactgaaaatagacatccatgtcattataccctacgaaggactctctggtgaccagatgggccagatcgagaaaatcttcaaggtggtgtacccagttgacgatcaccatttcaaagttattctgcattatggaaccctggtgattgacggagtaacacctaatatgatcgattatttcggtagaccatatgagggcattgctgtgttcgatggcaagaagatcacagttaccggaactttatggaatggaaacaagattattgatgagaggttgatcaatcccgacgggagtttgttattcagagtcacaatcaacggtgtgacagggtggagactatgcgagcgaattcttgcctaa

SEQ ID NO: 344 - DNA, 621 bp, Artificial Sequence
  Modified Open Reading Frame
atggcagtttacccgtacgatgtaccagactatgcagggtatccttatgacgtgccagattatgccggatcatatccatacgatgtaccggactacgcaggctccggcgtgtttaccttggaggactttgtcggcgactggagacaaacagctggttacaacttggaccaggtcctggagcagggaggtgtctcttctctattccagaaccttggcgtatccgtcacacctattcagcggatcgtattgagcggagagaacggcctgaagatcgatattcacgtaatcattccttatgaaggactttcaggcgaccaaatgggtcagattgagaaaatctttaaagtggtttatccagtggatgatcaccactttaaggtaatcctgcactatggtacccttgtaatcgacggcgtcacaccaaatatgatcgactacttcggcaggccctacgaaggtatcgcagtcttcgacggcaagaagattaccgtcactgggaccctttggaatgggaataaaattattgatgagcgcctcataaatcccgatggcagcctgttattcagggtgaccatcaatggagtgactggatggcggctgtgtgagcgtattctagcataa

SEQ ID NO: 345 - DNA, 621 bp, Artificial Sequence
  Modified Open Reading Frame
atggccgtctatccctatgacgtgcccgactatgccgggtacccatacgatgtccctgactacgcaggctcatacccatatgacgtaccagactacgccgggtccggcgtcttcacactggaggatttcgttggtgattggcggcagaccgctggctacaatttggatcaggtcctggaacaaggcggtgtaagctctctgtttcaaaacttaggagtctctgtgactcctatccaaaggatcgttctttctggcgaaaatgggctcaagattgatattcacgtgataattccttacgaaggtctctctggtgaccagatgggacagatcgagaagatcttcaaagtggtgtacccggttgatgaccaccacttcaaagtgatcctgcactatgggacactagttattgacggcgtcactccaaacatgatcgactacttcggaagaccctatgagggcatagcggtcttcgacggaaagaaaattactgtgaccggtaccctatggaacgggaataagatcatcgacgagcgactgataaatccggacggcagcctcctgttcagggttacaatcaacggagtgactggatggagattgtgtgagaggatccttgcataa

SEQ ID NO: 346 - DNA, 621 bp, Artificial Sequence
  Modified Open Reading Frame
atggcagtgtatccgtatgatgtgcctgactacgcaggttatccatacgacgtgcctgattatgcgggatcgtacccttacgatgtgccggattacgcgggaagcggagtgtttacgcttgaggacttcgtgggcgactggagacagactgccggatacaatttagaccaggtgctggaacagggaggcgtatctagtctgtttcagaacctcggagtgtcagttacacccattcagcgcattgtgctgtcaggtgagaatgggctgaagatcgacattcacgtcatcatcccgtatgaaggcttaagtggagaccagatgggtcagattgaaaagatcttcaaggttgtctaccctgtcgacgaccaccacttcaaagtgattcttcattacggaaccctggtgatcgatggcgtgactccaaacatgatcgattacttcgggagaccctacgaagggatcgccgtgttcgacggaaagaagataactgtgactggcacactgtggaacggcaacaaaatcattgatgagaggttaattaacccagatggctcactactgtttagagtaacgataaatggagtaactggttggcgtttatgcgagaggatcctcgcctaa

SEQ ID NO: 347 - DNA, 621 bp, Artificial Sequence
  Modified Open Reading Frame
atggcagtttatccttacgacgttcctgactatgctggatatccctatgatgtaccggactacgccggctcgtacccttatgatgtgccggattatgcaggatccggcgtctttacgcttgaagatttcgtgggcgattggcggcagaccgcaggatacaatcttgatcaggtcctcgagcagggaggagtctcctcactgtttcagaaccttggagtgagcgtgactcccattcagagaattgtcctcagtggagagaatggcttgaagatcgatatccatgtgattataccctatgaagggctttccggtgaccagatgggacaaattgagaaaatattcaaagtggtttatcccgtggatgatcatcactttaaggtcattctccactacggtactcttgtgattgatggagtgacaccaaatatgattgattacttcggcaggccgtacgaaggcattgccgtgttcgacggcaagaagattactgttacagggactctatggaacggtaataagattatcgacgagcgtctgatcaaccctgacggtagcctgctcttccgggtcaccatcaatggcgtgacagggtggagactgtgcgagcgaatcctggcctaa

SEQ ID NO: 348 - DNA, 621 bp, Artificial Sequence
  Modified Open Reading Frame
atggccgtgtatccatacgacgtccctgattacgccggatacccatacgatgtgcctgactacgctggcagttacccatatgatgtcccagattacgctggtagtggagtgttcacgctcgaggatttcgtgggagattggcggcaaacggctggatacaatctggatcaggttctggaacaaggaggcgtgtcctcactattccagaatctaggcgtgagcgttacacccattcagaggattgtgctgtcaggagagaacggcctgaaaatcgatatacacgttattatcccgtacgagggcctttctggtgatcagatgggccagatcgagaaaatcttcaaggtggtttatccggttgacgaccaccactttaaagtgattctgcattacggaactctggtaatcgacggcgtgacgcccaacatgatagactactttggtcggccctatgagggaatcgctgtgttcgatggcaagaaaatcactgtcaccggcactctgtggaacggaaataaaattatagacgaaaggcttatcaatccggatggctcacttctgtttcgggtgacgataaacggcgtgacagggtggcgactgtgcgagcggatcctggcctaa

SEQ ID NO: 349 - DNA, 621 bp, Artificial Sequence
  Modified Open Reading Frame
atggccgtgtatccatacgatgtccctgactacgccggctacccttacgacgtacctgattatgcaggaagctatccttacgacgtgcccgattacgctggttcgggagtgttcactttggaggatttcgttggagactggcgacagactgctggatataacctcgatcaagtgttagagcagggcggcgttagttcgctgttccagaatttaggcgtgtcagttacgcctatccaacgaattgtgctgtcgggcgagaacgggttgaagattgacatccacgtaatcatcccttatgaagggctatctggtgatcagatgggtcagatcgagaaaatcttcaaagttgtgtatccagtcgacgatcaccactttaaggtaatcctccactatgggaccctagtaatcgacggagttacacccaacatgattgactactttggccggccctatgaagggatcgctgtgttcgatggcaagaagattactgtcaccggcaccctgtggaatggaaataaaataattgatgaaaggttgataaaccctgacggcagcttgctatttagagtcaccatcaacggcgtcaccggctggcggctgtgcgagcggatcctggcctaa

SEQ ID NO: 350 - DNA, 621 bp, Artificial Sequence
  Modified Open Reading Frame
atggccgtttacccatacgatgtgcccgattacgcgggatatccttatgatgttccagactacgccggaagctacccatatgatgtgcccgattatgccggatctggagtcttcacacttgaagactttgtcggtgactggcgacagactgccgggtataatctggatcaggtattagagcagggaggagtgtccagtctatttcagaacttgggtgtatctgtgacaccaatccaacggatagtgctcagtggcgaaaacggtttgaagatcgacatccatgtcattattccttacgagggactgtcaggtgatcagatgggtcaaattgagaaaatcttcaaagtagtgtacccagtagacgaccatcatttcaaggtaatcctgcactatggtactctggtgattgacggagtgacaccgaacatgattgattacttcggacggccttacgaagggatagccgtatttgacgggaagaagatcacagttaccggcaccctctggaatggaaacaagatcattgatgaacgcttgatcaatcccgatgggtccttactcttcagagtcactatcaatggtgtcactgggtggcggctgtgcgagcgaatcctagcataa

SEQ ID NO: 351 - DNA, 621 bp, Artificial Sequence
  Modified Open Reading Frame
atggctgtctacccttacgacgtgcccgattacgcagggtacccttatgacgtgccggactatgctggcagttacccatacgacgtgcctgactacgccggcagtggcgtgtttacactggaggatttcgtgggcgattggcggcaaactgcaggctacaaccttgaccaggtcctggaacaaggcggagttagctcactgttccagaatctaggagtctcagtaactccgatccagcgtattgtcctgtctggagaaaacggtcttaagatagacattcatgtcatcatcccatacgagggcttgagcggcgaccaaatgggacagatcgagaaaatatttaaagtagtttacccagtagatgatcaccacttcaaggtgatcctgcattatggaacacttgtgatagacggcgtgacaccaaatatgatcgactacttcgggcggccttacgagggtatcgccgtattcgatgggaagaagattactgtgactgggacactttggaacggaaacaaaatcatcgatgagagacttatcaaccctgacgggagtttgctgtttcgtgtaacgatcaacggagtgacagggtggaggttatgtgagcggatccttgcctaa

SEQ ID NO: 352 - DNA, 621 bp, Artificial Sequence
  Modified Open Reading Frame
atggctgtttatccatacgacgtacctgactatgcgggttacccgtatgacgtgcccgattacgccggatcctacccatatgacgttccagattatgcaggcagtggtgtgttcactctagaggacttcgtgggcgattggcgccaaacagctggctataacttggatcaggtgttggagcagggcggcgtctctagtttatttcaaaacttgggcgtgtctgttacacctatccagcgtatcgtactcagcggagagaacggcctgaaaatcgacatccacgtgatcatcccatatgagggactgagcggcgaccaaatgggccaaatcgagaagatattcaaggtggtatatcccgtcgatgaccaccatttcaaggtcattctgcattatggtacattggtcatagacggagtcacacctaacatgattgattactttggcagaccgtacgaaggtattgcggtgttcgacggcaagaagatcactgtgaccggtaccttatggaacggcaataagattattgacgaaagactaatcaatccagatggttcgcttctgtttcgggttaccattaatggagtcaccggatggcgcctttgtgagcggatcctagcctaa

SEQ ID NO: 353 - DNA, 621 bp, Artificial Sequence
  Modified Open Reading Frame
atggccgtctacccatacgatgtaccagattatgccggctacccatatgacgtcccagactacgctggatcctatccctacgatgtgcctgattatgccggctcaggagtgttcacccttgaggacttcgtaggtgattggcgccagacggctgggtacaacttggaccaggtgctcgagcaaggtggagttagctcgctgtttcagaacctgggtgtgagtgtcacgccaattcagcggatagtgttatctggcgaaaatgggctcaagattgatatccacgtaatcattccttacgaaggcctctcaggcgaccaaatgggacaaatcgaaaagatctttaaggtagtgtacccagtggatgaccatcacttcaaagttatcttacattacggtaccctggtgatcgacggcgttacgcctaacatgatcgattatttcggccgcccgtacgagggcatagcggtgttcgatggtaagaagataaccgtcacgggaacactgtggaacggaaataagataattgacgaaagactaattaatcccgatggcagcctactgtttagggtaaccattaacggcgttaccggatggcggctctgtgaacgtatcctggcataa

SEQ ID NO: 354 - DNA, 621 bp, Artificial Sequence
  Modified Open Reading Frame
atggccgtgtatccatatgacgttcctgattacgcaggatacccttacgacgtgcccgactatgctggcagctacccatacgatgtacccgactacgccggctccggagtgtttacgcttgaggactttgtcggcgattggaggcaaacggccggttacaacctggaccaagtgttggagcagggaggagtgtccagtctattccagaatctcggcgtttcggttacgccgatacaaaggatcgtgcttagcggcgaaaatgggttgaagatagacatccacgtcatcatcccttatgagggcctgagcggtgatcagatgggacaaattgagaaaatctttaaggtggtttatcctgtagatgaccatcacttcaaagtcatactacactacgggaccctggtcattgacggagtgactcccaacatgatcgactatttcgggcgtccttacgagggcatcgctgtattcgacggcaagaagattaccgtcactgggaccctctggaacggcaacaaaattattgatgagcggttgatcaacccagatggcagcctgctgtttcgtgttactataaacggtgtaacaggttggcgcctctgtgaacgcatcctggcctaa

SEQ ID NO: 355 - DNA, 621 bp, Artificial Sequence
  Modified Open Reading Frame
atggcggtatacccgtatgatgttcccgactatgccggctatccatacgacgtaccagactacgctgggagctacccttacgatgtaccagactacgcaggcagcggtgtcttcacgctagaagatttcgtaggtgattggcgacaaactgcgggttacaatctggatcaagtgctggaacagggaggcgtatcctccctctttcagaatctgggagtatccgtgactcctatccagaggatcgtgcttagtggtgaaaacggacttaaaatcgacatacacgtgataataccttatgagggactgtctggtgaccaaatgggacagattgagaagatctttaaggtggtttatcccgtggatgatcatcacttcaaggtaatcctccattatggcacactcgtcatcgacggcgtcactcccaatatgatcgactactttggccgcccgtatgaagggatcgccgtgttcgacggcaagaagataacagtgacaggaacactgtggaacggaaataaaatcatcgacgagagactgattaatcctgatggttcccttctctttcgagtcacaatcaatggagtcactggctggagactatgcgagagaatcctggcctaa

SEQ ID NO: 356 - DNA, 621 bp, Artificial Sequence
  Modified Open Reading Frame
atggcggtatacccttatgatgtgccggactacgccggatacccttacgatgtgccagactacgcgggtagctatccatatgacgttccagattacgcgggaagcggcgtgttcaccttggaggatttcgttggcgactggagacaaaccgcaggatacaatctagaccaggttctggaacagggaggagtgagttcgttgtttcaaaaccttggtgtttcagtcacaccaatacagcgaatcgtactgtcaggcgagaatgggttaaagattgacatccacgtcataattccttacgagggcctctctggcgaccagatgggtcagatcgagaagatcttcaaggtcgtgtatcccgtcgacgaccaccactttaaggtgattctgcactacgggaccttagtgattgacggtgtaactcccaatatgatcgactactttgggcgaccctacgaagggattgccgtgttcgatggcaagaagataacggtgacaggcactctttggaatggcaataaaatcatcgacgagagactgatcaatcccgatggaagtcttctattccgggttacgatcaatggcgttacaggctggcgcctgtgtgaaaggatcttggcgtaa

SEQ ID NO: 357 - DNA, 621 bp, Artificial Sequence
  Modified Open Reading Frame
atggcggtgtacccatatgacgtaccggactacgcgggatacccgtatgatgttccggattacgccgggtcctacccttatgatgtgcccgattacgcgggctctggagtctttactctggaggactttgtgggtgattggcggcaaactgcagggtataatctggaccaggtcctggagcaaggaggagtctcctccttgttccagaacttgggagtgtcagtgacacctatccagagaatcgttctctccggagagaatggactgaagatcgacattcatgtgataattccatatgaaggcctatctggcgaccaaatgggccagatagagaagatcttcaaagtcgtataccctgtggacgaccatcacttcaaagtcatactacattatgggacgttagtgatcgacggcgtaactccgaacatgatcgactacttcggtcggccatacgagggtattgcagtgtttgacggcaagaagatcacggtgaccggtactctgtggaatggtaacaagataattgacgaacggttgattaatccggatggatcccttctattccgggttaccatcaacggagttactggttggaggttgtgcgagcggatactggcataa

SEQ ID NO: 358 - DNA, 621 bp, Artificial Sequence
  Modified Open Reading Frame
atggcggtgtacccatatgatgtgccagactacgctggctatccatatgatgtcccagactacgccgggtcgtacccgtacgacgtaccggattacgcaggatccggagtctttacccttgaggactttgttggagattggcggcagacagcgggatacaatctggatcaggttctggagcaaggcggcgtttccagtctgttccagaaccttggcgtgtctgtcactccaatccaacgaatagttctctccggcgagaacggattgaagattgacatacacgtcattatcccgtacgagggtctctctggtgaccaaatgggccagattgagaagatcttcaaagtggtgtatcccgtcgacgatcatcactttaaggtcatcttacattacgggacccttgtgatagacggcgtaacacctaatatgatcgactactttggtcggccatatgaaggtatcgctgtcttcgacgggaagaagattaccgtgaccggaacactctggaacggtaacaagatcatcgacgagcgactgatcaatccagatggttccctgctgttcagagtgactattaacggcgtgaccggttggcgcctgtgtgaacggattctagcttaa

SEQ ID NO: 359 - DNA, 621 bp, Artificial Sequence
  Modified Open Reading Frame
atggctgtctatccgtatgatgtcccagactatgctggatatccatacgacgtcccggattatgctgggtcctacccgtatgacgtgcccgactatgcagggtctggcgtgtttacgctggaggactttgttggcgactggcgccaaacagccggctataatctggaccaggttctggagcagggaggcgtgtcttccctgtttcagaacttgggagtgtcagttacgcccatacagcgcattgtgctgtcgggcgaaaacgggctcaagatagacatccatgtgatcatcccgtacgagggcctgtctggcgaccagatgggtcagatcgagaagatcttcaaggtggtctacccggtagacgatcatcatttcaaagtgatactccattacggtactctcgtgattgacggtgtcactccaaatatgatcgactactttggtaggccatatgagggaatcgcagtgttcgatggcaagaaaatcacggtgaccggtacgctttggaacggtaataagattatcgatgaaaggctgattaatcccgatggctcactgctctttcgtgtcacgatcaatggcgtgaccggatggaggctctgtgagcggatattagcctaa

SEQ ID NO: 360 - DNA, 621 bp, Artificial Sequence
  Modified Open Reading Frame
atggctgtctacccttatgatgtcccggattacgctgggtatccttacgacgtcccggattacgctggctcatacccatacgacgtccctgattatgccggaagcggagtattcacactggaagacttcgtaggcgactggcgccagacggcaggttataacctggatcaggttctggaacagggaggcgtgtcctccctgtttcagaacttgggtgtgagtgtgactccaattcagaggatagtgctgtcgggtgaaaacggtcttaagatcgatattcatgttattattccatatgagggcctaagtggagatcagatgggacaaatcgagaagatcttcaaggttgtgtacccagtcgatgatcaccactttaaggtgatcttgcactacggtactctcgtgatcgatggcgtcacgcccaatatgatcgattacttcggtaggccctacgagggtatcgcagtgtttgatggtaagaagatcaccgtaacgggcactctgtggaatggtaacaagattatcgatgagagactgattaaccctgatggttctctcctctttagagtcacaataaacggcgtaactgggtggcgtctctgtgagaggatcctagcgtaa

SEQ ID NO: 361 - DNA, 621 bp, Artificial Sequence
  Modified Open Reading Frame
atggcagtgtatccgtatgatgtacccgattatgcgggctacccatatgatgttcccgattacgcagggtcctatccctacgatgttcctgattatgccgggtccggcgtattcacgctggaggacttcgtcggagattggcggcagactgccggatacaatcttgaccaggtcctggaacagggaggagtctcttccctgttccaaaatctgggtgtaagcgttacacccatacagcggatcgttctctctggagagaacggtcttaagatcgacatccacgtgatcattccgtatgagggcctcagcggtgatcagatgggccaaatcgaaaagatctttaaggttgtctatcccgtggatgatcatcactttaaagtgatattacattacggcaccctagtaattgacggcgtaacgccgaacatgatcgattactttgggaggccgtatgaagggattgcggtgtttgacggtaagaaaattaccgtcaccgggaccctgtggaacgggaacaaaatcatagatgagaggttgatcaaccctgacggtagtctgttatttcgggtaaccatcaatggtgtgacaggttggcgactgtgcgagcggatcctggcctaa

SEQ ID NO: 362 - DNA, 621 bp, Artificial Sequence
  Modified Open Reading Frame
atggcggtgtatccatatgatgtgcccgattatgcgggatatccatatgacgttcctgattatgccgggagctacccatatgacgtcccagattacgccgggagtggcgtgtttaccctagaagacttcgtcggtgattggcggcagactgccggttacaatctcgaccaagtcctggaacagggaggagtctcctccctgttccagaatctaggcgtaagcgtcactccgatacagcggattgtacttagcggtgaaaatgggctgaaaatcgacatacatgtgattattccttatgaaggcctttcaggcgaccagatgggacagattgagaagatattcaaagtagtctatcctgtggatgaccatcatttcaaggtgatactccattacgggaccctggtcatcgatggagtaacacctaacatgatagactactttggacgcccatacgagggcatcgccgtcttcgatgggaagaagattaccgttaccggaacactctggaatggtaataaaatcatcgatgaacggctgattaacccggacgggagtctcctgttccgggttaccatcaacggcgtgacaggttggcggctgtgcgaacggatactcgcgtaa

SEQ ID NO: 363 - DNA, 621 bp, Artificial Sequence
  Modified Open Reading Frame
atggcggtgtacccgtacgatgtaccggactatgccgggtacccgtatgacgtaccagactacgctggttcgtatccatatgatgtacccgattacgcaggttccggagtgttcaccctcgaagacttcgtgggtgactggcgccaaactgccggttacaacttggaccaggtgctggagcagggaggagtctcttccctgttccagaacctgggcgtctctgtgacgcctatccagcgaatcgtcctgtccggagagaatgggctgaagattgatattcatgttattattccatacgagggtctgagtggtgatcagatgggccaaatagagaaaatctttaaggtggtctatcctgtggacgatcatcacttcaaggttatcttgcactacggaactcttgtcatcgacggcgtgactcccaatatgatcgactacttcggtcgaccatatgagggaatcgcagtgttcgatggtaagaagatcacggtaaccggcactctatggaatggtaacaagattatcgatgagcggctcattaatccggacgggtctttgctgttccgagttaccatcaatggtgtaaccggctggcgcctatgcgagcgtatcttggcgtaa

SEQ ID NO: 364 - DNA, 621 bp, Artificial Sequence
  Modified Open Reading Frame
atggccgtgtatccgtatgatgtccctgactacgccgggtacccgtacgatgttccggactacgcgggtagttacccgtacgatgtgccggactatgcaggatccggagtgttcacgctagaggacttcgtgggtgactggcgccagacggccggatacaacctggaccaggtgctggagcagggcggagtttcgtccttgttccagaatctcggcgttagcgtcacacccatccagcggattgtccttagcggtgagaacggtcttaagatcgatatacatgttataattccttacgaagggctgtccggagaccaaatgggtcagatcgaaaagatctttaaagtcgtgtatcctgtagatgaccatcactttaaggtcattctacattacgggactttagtaatcgatggagtaactccaaacatgatcgattacttcgggcgtccttacgaagggatagcagtatttgacggcaagaaaataacagttactggtacactgtggaacggcaataagatcatcgacgaacgactgattaacccagatgggtcattgctgttccgagtcacaatcaacggcgtgaccggttggcgactgtgcgagcgcattcttgcgtaa

SEQ ID NO: 365 - DNA, 621 bp, Artificial Sequence
  Modified Open Reading Frame
atggctgtgtatccctatgatgtcccagattacgccggctatccgtacgacgttcctgactatgctggctcctatccctacgatgtccctgactatgcaggctccggagtgttcactctggaggactttgtgggcgattggaggcagacggcaggatacaatctggatcaggtgctcgagcagggcggcgttagttccctcttccagaatcttggtgtgtccgtcacacctatccagagaatcgtcctatcgggcgaaaacggcctgaagatcgacatccacgttatcatcccttacgagggattgagtggtgaccaaatgggtcagattgaaaagatcttcaaggttgtttatcccgtggatgaccatcactttaaagtgatactgcattacgggactctggtgatagatggcgtgacacccaacatgatcgattacttcggaagaccctatgagggaatcgccgtcttcgatggcaagaaaatcacggtgaccgggacactgtggaatggcaacaagatcattgatgagcgtctcatcaatccggatggatcgttgttattccgagtcaccataaacggcgtgactggttggcgcctgtgcgagcggattctcgcttaa

SEQ ID NO: 366 - DNA, 621 bp, Artificial Sequence
  Modified Open Reading Frame
atggctgtgtacccatacgacgtgccggattatgctgggtacccatacgatgtaccagactacgcgggctcttatccttatgatgtgcccgattatgcagggtccggcgtcttcactcttgaggacttcgttggcgattggagacagacggccgggtataacctggaccaggtactggaacagggaggcgtgtcttcgctgtttcagaacctgggcgtctctgtgactccaatccagcgtatagtccttagcggtgaaaacggcctgaagatcgatattcacgttattatcccatatgagggcctctccggagatcagatgggacaaatcgagaagatcttcaaagtggtgtatccagttgatgaccaccactttaaggtgatcctgcattatggtactctggtaatcgatggtgtgactcccaacatgatcgactacttcggacgtccgtatgagggcatagcggtgtttgatggcaagaaaataactgttaccggtacactgtggaatgggaataagattatcgacgaaaggttgataaacccagatggttcactcttgttcagagtgactatcaacggtgttaccggctggcgattgtgcgagagaattctcgcataa

SEQ ID NO: 367 - DNA, 621 bp, Artificial Sequence
  Modified Open Reading Frame
atggcggtttacccttatgacgtgcccgactacgccggctacccttacgatgtgcccgattacgctggctcatacccatacgacgtacccgattatgcaggcagtggcgtgtttaccttagaagactttgtaggcgactggcggcaaacggcaggctataacctcgatcaagttctcgagcaaggtggagtgtcttcattatttcaaaatcttggtgtttcggtcacacctatccaaagaatcgtactgagcggcgaaaacggactgaaaattgatatccacgttattatcccatacgaaggactgagcggagaccaaatgggtcaaattgagaaaatctttaaagtagtgtacccagttgacgaccaccatttcaaagtaattcttcactacggaactctagttatcgacggagtgacgcccaatatgatagactatttcggaagaccttatgaaggaattgcagtatttgatggaaagaaaataacagttaccggcaccctgtggaatggaaacaaaataatcgatgaacggctaataaaccctgacggatcactattgtttagagtgactataaatggagtaacaggatggcgcttgtgtgaacgaattctcgcctaa

SEQ ID NO: 368 - DNA, 621 bp, Artificial Sequence
  Modified Open Reading Frame
atggccgtatacccttacgacgtgccagactacgctggatatccttatgacgtgccagattatgcaggaagctacccatatgacgtgccggactatgcaggctcaggagtgtttactttagaagactttgttggcgactggcgacagaccgcaggttacaatttagaccaagtgttggaacaaggaggagtatcaagcctatttcaaaacctcggcgtatcggttactccgattcagagaattgtgctcagtggcgagaatggcctaaagatagacatacatgtaataatcccatacgaaggcttgagtggcgaccagatgggtcagatagaaaagatatttaaagttgtgtatcccgtagacgatcatcacttcaaggttatactacattacggaacattagttattgacggcgtaacaccaaacatgatagattatttcggacgaccttatgagggaatagctgtatttgatggaaagaaaatcaccgtaaccggtactttatggaacggaaacaagattatagacgaacgactgataaacccagacgggagcctgttatttagggtcactattaatggagtcactggttggagactatgtgaaaggatcttagcttaa

SEQ ID NO: 369 - DNA, 621 bp, Artificial Sequence
  Modified Open Reading Frame
atggcagtatacccttacgacgtacccgactatgctggctacccttacgatgtgccggattacgctggttcttatccatacgatgtacccgattacgcagggagtggagtgttcacattggaagactttgtgggagattggagacaaaccgccggatacaatcttgatcaagtactagagcagggaggcgtttcctcattatttcagaatctgggcgtatcagtgacaccaatccagagaattgtcctatcgggagaaaatgggcttaaaatcgacattcatgttattattccttatgagggacttagcggcgatcagatgggtcaaattgagaaaatctttaaggtcgtgtaccctgtggatgaccatcactttaaagttatcttacattacggaacgttagttatcgacggagttacacccaatatgatagactactttggcaggccatatgaaggaattgcggtatttgacgggaagaaaattacggttacaggcactttatggaacggaaacaaaataattgacgaacggctaataaaccctgatggctccctattatttagagtgacgattaacggagtaacgggatggaggctgtgtgaacgcattctggcttaa

SEQ ID NO: 370 - DNA, 621 bp, Artificial Sequence
  Modified Open Reading Frame
atggccgtttacccatatgacgtcccggattatgcaggatacccatatgacgtcccagattatgcaggcagctatccctacgacgtccctgattatgctggctcaggcgtgtttactttagaagatttcgttggcgattggagacaaacggctggttacaacctcgaccaggtacttgagcagggcggtgtttcatcattatttcagaatttaggagtctctgttacaccaatacaaagaatcgtgttaagcggcgaaaatgggctaaagatcgatatccacgtaattattccttatgaaggcctctccggtgatcagatgggccagatcgagaagatatttaaagttgtatacccagttgacgaccaccactttaaggttatactccattacggcaccctagtgatagacggtgtgacacctaatatgattgactactttggacgaccctacgaaggaattgctgtatttgacggaaagaagataaccgtaaccggaacattgtggaacggaaacaaaatcattgacgaacggctaattaacccagatggatccctattgtttcgtgtaaccatcaacggcgttaccggctggcgactttgtgaacgcatactagcataa

SEQ ID NO: 371 - DNA, 621 bp, Artificial Sequence
  Modified Open Reading Frame
atggccgtgtatccttatgatgtgccagactatgccggatatccatacgacgtaccagactacgcaggatcatacccatacgacgtacccgactacgcaggaagcggcgtgtttacgctggaagacttcgtgggagactggcgacaaaccgcgggatacaatttagaccaggtactagaacagggtggtgtttcttctctctttcaaaatctaggtgtgagcgttacgcccattcaaaggatcgtgctatctggcgagaacggcctcaaaatcgatatccatgtaataataccatatgagggactaagcggagatcaaatgggacaaatagagaaaatcttcaaagtcgtgtatccagttgacgaccatcatttcaaagtaatcctgcactatggcaccttagtaatagacggtgtaactccaaacatgattgactacttcggacggccttacgagggaattgctgtattcgacggaaagaaaataacagttaccggaaccctttggaacgggaataaaattatagacgaaagactaatcaacccagacggatcgcttctcttcagagtaactattaacggtgtaacagggtggagactgtgtgaacgaatcttagcttaa

SEQ ID NO: 372 - DNA, 621 bp, Artificial Sequence
  Modified Open Reading Frame
atggcggtgtacccatacgatgtgcctgactatgctggttacccttacgacgtgcctgactatgctggatcttacccttacgacgtgcccgactatgcaggaagcggcgtgtttaccctcgaagacttcgtcggagactggcggcagacagccggatacaacctagatcaagtcctggaacaaggaggcgtctccagcctctttcaaaatctcggcgttagcgtcacacctatacaacggatagttctgagcggtgaaaacggtttgaaaattgatatacatgtgataatcccttacgaaggactcagcggagaccaaatgggtcagatagagaaaatatttaaagtagtttacccagttgacgaccatcatttcaaagtaattctgcactatggcaccttggtgattgacggcgtgacacccaatatgattgattatttcggccgcccttacgaaggcatcgctgtgtttgacgggaagaaaataactgtgactgggaccctgtggaatggcaataaaataatagacgagagacttatcaaccctgacggtagcctattattccgggtaacaataaatggagtgaccgggtggcgactatgcgaacggatcttagcctaa

SEQ ID NO: 373 - DNA, 621 bp, Artificial Sequence
  Modified Open Reading Frame
atggccgtttacccatacgacgtccctgactatgctggttatccttatgacgtacctgactatgctggctcttatccttatgatgtacctgattatgctgggtccggcgtgtttacccttgaagactttgtaggagactggagacagactgctggctataatttagatcaagtattggaacaaggaggagtttcttcactctttcaaaatttgggcgtatccgtgactcccatacagagaatagtgctttccggtgagaatggactgaaaatcgatatacacgtgataataccatacgaaggactgtctggagatcaaatgggccaaatcgagaaaatatttaaagttgtatacccggttgacgatcatcatttcaaggtcatcctgcattacggcaccctagttatagacggcgtcacgccaaacatgatagattacttcggccgcccttacgaagggattgcggtgtttgatggaaagaagatcacagtgacgggcaccctatggaacgggaacaaaattattgacgaacgtttaatcaaccctgacggctctctgctcttccgtgtaacaattaatggcgtaactggttggcgattatgtgaaaggattcttgcctaa

SEQ ID NO: 374 - DNA, 621 bp, Artificial Sequence
  Modified Open Reading Frame
atggctgtgtatccttacgacgtgcccgattatgctggctacccttacgacgtcccagattatgccgggtcctatccatacgacgtgcccgactatgccggaagtggagtatttaccctagaagatttcgtcggtgattggagacaaacagcaggctacaatttagatcaagtcctagagcaaggcggcgtttcaagcctcttccagaatttaggcgtaagtgtaacgcccatacagcggatcgtacttagtggagaaaatggccttaaaatcgatattcatgtaatcataccctacgaaggactgagtggtgaccagatgggacaaatagaaaagatattcaaggtggtatatcccgtagacgaccatcatttcaaagttatattgcattacggtactcttgttatcgacggcgtaacgcccaacatgattgattacttcggacgaccctatgaaggcatcgcagtgtttgacggaaagaaaattacagtaacgggaactttatggaatggaaataaaattatcgacgaacgcctcataaatccagacgggtcattgctattcagagtcacaattaacggagttacgggatggcgactgtgtgaaaggattcttgcctaa

SEQ ID NO: 375 - DNA, 621 bp, Artificial Sequence
  Modified Open Reading Frame
atggccgtatatccttacgacgtgcctgactatgctggctatccttatgacgtgcctgactacgctgggtcatatccctacgatgtgccagattatgccggatcgggagtgtttaccctagaggactttgtgggcgactggagacaaactgctggatacaatcttgaccaagtcttagaacagggcggagtgagtagcttatttcaaaatctgggcgtgtccgtcacaccgattcaacgaatagtgttgtccggagaaaacggtttgaaaattgatatacatgtgataattccttacgagggtctttccggcgaccaaatgggtcaaatcgagaaaatattcaaagtcgtatatcccgtcgacgatcaccactttaaggttatactgcactacggaacattagtaattgatggcgtaacaccaaacatgatagattatttcggacgcccatatgagggaatcgcagtctttgatggaaagaaaattacagtgacaggaactctatggaacggtaacaaaatcattgacgaacgcttaattaacccggacggttctctgctgtttcgcgtaacaataaatggagtaacaggttggcgcctatgtgaacgtattcttgcataa

SEQ ID NO: 376 - DNA, 621 bp, Artificial Sequence
  Modified Open Reading Frame
atggccgtttacccatacgatgtaccagactacgccggctatccctacgacgtgcccgactatgccggaagctatccatatgatgtacctgattatgccggtagcggcgtatttacacttgaagactttgtgggagactggagacaaactgctggatacaacttagatcaggtcctcgaacaaggcggagtaagttccctgtttcaaaacttaggagtgagcgtcacacccattcaaaggattgtgttatcaggagagaatggcctaaagattgatattcacgttataattccctacgaaggactatctggagaccaaatgggacaaattgaaaagatcttcaaggtagtttatcctgtagacgaccaccactttaaagttatcctccattacggtaccttagttatcgacggtgttacgccaaacatgatagattatttcggacgcccatacgagggcattgcggtctttgacggaaagaaaattacagttactggaaccctttggaacggaaacaaaatcatagatgaaaggctaataaacccagatggatcactcctctttcgtgttactatcaacggagtcactggctggcgcttatgtgaaagaatactggcttaa

SEQ ID NO: 377 - DNA, 621 bp, Artificial Sequence
  Modified Open Reading Frame
atggctgtctatccgtacgatgtgcccgactatgccgggtatccgtacgatgtcccggactatgccggatcgtacccatacgacgtaccggattatgcagggtctggcgtgttcactctcgaagacttcgtgggagattggaggcaaacggcaggctataatctggatcaagttctggaacagggaggcgtctcgtcactcttccagaacttaggcgtgtctgtgactcccatccagcggattgttctttcaggcgaaaatggcttgaaaatcgatatacatgtgattatcccttatgagggcctgtccggagatcagatgggacaaatcgaaaagatcttcaaggttgtctaccctgtcgatgatcatcactttaaagtgatactgcactacggtactctagtcatagatggcgtgacgccaaatatgatagactacttcgggcggccctatgagggaatcgctgtgttcgatggtaagaagattactgtaacgggcactctctggaatgggaataaaatcatagacgaacgccttattaatccggatggtagcctgctgttcagggttacgattaacggagtcaccggctggaggctctgtgaaaggatcctggcgtaa

SEQ ID NO: 378 - DNA, 621 bp, Artificial Sequence
  Modified Open Reading Frame
atggctgtttatccctatgacgttccggactacgcagggtacccatatgacgtgccagattacgcaggatcatatccgtacgacgtaccggactatgctggatctggcgtgtttacattagaggactttgtcggcgattggaggcagacggcaggatataacctagatcaggttctcgaacagggtggtgtctcatcactctttcagaatctaggagtgagcgttacgccgatacagaggatcgtcctaagcggcgaaaacggattgaagatcgacatccatgtgattataccatacgaaggcttaagcggtgaccagatgggccagattgaaaagatctttaaagtggtgtatccagttgacgatcatcactttaaggttatcttgcattatggcacactggttatagacggcgtcactccgaatatgatcgattatttcgggagaccctatgagggtatcgcagtcttcgatggtaagaagattaccgttactggaactctctggaacggtaataagatcatagatgaacgactcatcaatccggatggatcactcttgtttcgcgtgaccatcaatggcgtgacaggttggcgcctgtgtgagaggattctcgcgtaa

SEQ ID NO: 379 - DNA, 621 bp, Artificial Sequence
  Modified Open Reading Frame
atggctgtttatccctatgacgtgcctgactatgcaggttacccgtacgacgtgccagactatgctggtagttatccgtacgacgtaccggattacgcgggaagtggtgtctttactctggaggacttcgtcggtgactggcgtcaaactgctggatacaaccttgaccaggtcctggaacagggcggcgtgagtagcctgtttcagaatctgggcgtgtcggtgacacctattcagcgcatagtactaagcggcgagaatggtctcaagattgatatccatgtgatcataccgtatgagggtctcagcggtgatcagatgggacaaatcgagaaaatattcaaggttgtgtacccggtagatgaccatcatttcaaggtaatcttgcactatggtacgctggttatcgatggagtcactccaaacatgatagactacttcggacgtccgtatgagggaatcgcagtgttcgacggtaagaagataacagtgacagggaccctttggaatggtaataaaatcattgatgagcgactcattaatccagacgggtctttactgttccgggttaccatcaacggtgtcacagggtggcgcctctgtgagcggattctggcttaa

SEQ ID NO: 380 - DNA, 621 bp, Artificial Sequence
  Modified Open Reading Frame
atggctgtctatccgtacgacgttccagattacgcagggtatccctatgatgtcccggactacgctggcagctatccctacgacgtgcccgactacgccgggtctggagtcttcacgcttgaagacttcgtgggcgattggaggcagactgctggatataacctagaccaagttctggaacaaggtggtgtgtctagtctgtttcaaaatcttggcgtatcggtcacaccaatccaaaggattgttctctctggagagaatggactcaaaattgatatccacgtaatcattccatatgagggtctcagcggcgaccagatgggccagatcgaaaagatctttaaagtggtttatcccgtagacgatcaccacttcaaggtgattctacactatgggactctggtgatcgacggagtgactccaaatatgattgattactttgggcggccctacgaagggatagcagtgtttgacgggaagaagatcaccgtgacaggaaccttatggaatggcaacaagattatagatgagaggttaatcaatccggatggtagtctcttatttagagtgacgatcaatggcgtgacaggctggcggttatgcgaaaggatcctggcataa

SEQ ID NO: 381 - DNA, 621 bp, Artificial Sequence
  Modified Open Reading Frame
atggctgtctatccgtacgacgtaccggactatgcaggttatccatacgacgtacccgactatgcgggctcgtacccgtatgacgtaccggactacgccggttcgggagtcttcactttagaggactttgtcggagactggcgccaaacggctgggtacaaccttgatcaagtgcttgagcaaggtggtgtatccagcctgttccagaatctgggagtctccgtcactcccatacagcgtattgtgttgtctggcgagaatggattgaaaatcgacattcacgtgataataccatacgaaggccttagcggagaccagatgggccagatcgagaagatcttcaaggtagtctatcctgttgacgatcaccatttcaaggtgattcttcactatggaaccctggtgatcgatggcgttacgccaaacatgatagattactttgggcgcccttacgagggcatcgctgtattcgacggcaagaagattacagtgacaggaactttatggaatggcaacaagatcatcgacgagcgactgatcaaccctgatggctccttgctgttccgagtgacaatcaatggagtcacaggttggcgactgtgcgaaagaatcttagcctaa

SEQ ID NO: 382 - DNA, 621 bp, Artificial Sequence
  Modified Open Reading Frame
atggctgtctatccttatgacgttccggactacgctggatatccatatgatgtaccagattatgccggatcatacccttatgacgtgccggattatgcaggatccggcgtgtttacgttggaggatttcgtaggagattggagacagaccgccggctacaacctcgatcaagtgcttgaacagggcggagtcagttctctattccaaaatctaggtgtgagtgtcacacctatccaacgtatcgtgttgtccggcgaaaatgggctgaagatcgatatccatgttatcattccatacgaaggcctgtctggcgaccaaatgggccagatcgagaagatcttcaaggtcgtgtatccggttgatgaccaccacttcaaggtcatccttcactatggcaccctggtgatcgacggtgttacaccgaacatgatcgattactttgggcgcccatatgagggaatagccgtctttgatggtaagaaaattactgtcaccgggacactatggaatggtaacaagattatcgacgagcgcctgattaacccagacggtagtctgttgtttcgggtcaccatcaacggcgtgacgggttggcgtctctgtgagcggattctagcttaa

SEQ ID NO: 383 - DNA, 621 bp, Artificial Sequence
  Modified Open Reading Frame
atggccgtctacccatatgacgtgccagattacgccgggtatccgtacgacgtccctgactacgctggttcgtatccttacgacgtaccagactatgcaggttctggtgtcttcaccctggaagacttcgtcggagattggaggcagaccgccgggtataatttggaccaagtgctggaacagggtggcgtgtcatcactgtttcagaaccttggagtctctgttactcccatacagcgaatagtgctctcgggagagaacggcctgaagattgatattcatgtgataataccatatgaaggtctctcgggcgaccaaatgggccaaatcgagaaaatctttaaggtcgtctatcccgtggacgatcaccactttaaggtgatcctccattatggcacgctggtaattgatggtgttacgcctaacatgatcgattactttggacggccatacgagggcattgccgtgtttgacggtaagaagattactgtaacaggcacgctgtggaatggtaacaaaatcatcgatgagagactaattaatcccgacggcagtctcctatttcgggttacgatcaacggagtcacaggttggagactgtgcgaacggatcctggcgtaa

SEQ ID NO: 384 - DNA, 621 bp, Artificial Sequence
  Modified Open Reading Frame
atggcggtatatccctatgatgtgccggactatgcagggtacccgtacgacgtaccagactacgccggatcctatccctatgatgtgccagactacgccgggtccggagtctttacactagaagatttcgtaggagactggcggcagaccgcaggatataatcttgaccaggtcctagagcaaggcggcgtaagctccttgttccagaacctcggcgtgtcggtgacacctattcagaggattgtcttgagcggtgaaaacgggctcaaaatcgacattcacgtgatcatcccttacgaaggcttgtccggtgaccagatgggtcagatcgagaagatctttaaagtggtctatcctgtggacgatcatcactttaaagtgatacttcattatggcacattagtcattgatggagtaactccgaacatgatagactacttcggcaggccttacgaaggaattgccgtattcgatggcaagaagatcacagtgactggcacattgtggaatgggaataagattatcgatgagcgcttaatcaatccagatggctcactgctgtttcgtgtcacgataaacggcgtgacgggttggaggctttgcgagcgcatactggcttaa

SEQ ID NO: 385 - DNA, 621 bp, Artificial Sequence
  Modified Open Reading Frame
atggcggtgtacccgtacgacgtgccagattacgctgggtatccgtatgatgtccctgattacgctggtagctacccttacgatgtgccagactacgctggctctggagtgttcaccctggaggatttcgtcggagattggcgtcaaactgccggctataatctcgaccaggtgctagagcaaggcggagtctcaagtttatttcaaaacttgggagtctcagtgactcccatacagcgtatcgtactcagcggcgagaatggtctaaagatagacattcacgtgataataccctacgagggattgtcaggtgatcaaatgggccagatcgagaagatattcaaggtcgtttatcctgttgatgaccatcatttcaaggtcatcctacactatggtaccctagtgatagacggagtgactccgaacatgatagactatttcggccggccttatgaaggcattgctgtgttcgacggaaagaagatcacagtgacaggaactttgtggaatggcaacaagattattgatgagcggttgatcaacccagacgggagcctcttgtttagggtcaccattaacggcgtgaccggttggcgactgtgcgaaaggattctagcctaa

SEQ ID NO: 386 - DNA, 621 bp, Artificial Sequence
  Modified Open Reading Frame
atggctgtctacccttatgacgtacctgactacgcagggtatccctacgacgtacccgattacgcgggcagctatccttatgatgttcccgattacgcagggtccggcgtgttcactctggaggactttgtaggtgactggcgtcagacagcgggttacaacttggatcaggttctggagcagggtggcgtaagttccctgtttcaaaacctaggagtctcagtgacaccgatccagcggatcgtcctgtcaggagagaacggtctcaaaatcgacatccatgtgattattccctatgagggtctctcgggagatcagatgggtcagatcgaaaagatattcaaagttgtataccctgtcgatgaccatcacttcaaagtcatacttcactacgggaccctggtgatcgacggagtgacgcctaatatgatcgactactttggtcgaccatatgaaggcattgcggtgttcgatggcaagaagataaccgtcaccgggactctgtggaacggtaataagattatcgatgagcggctcattaatccggacggcagtctgctgttcagggtcacaatcaacggagtcaccggatggcgtctgtgtgagagaatcctagcataa

SEQ ID NO: 387 - DNA, 621 bp, Artificial Sequence
  Modified Open Reading Frame
atggccgtatacccatatgatgtgcctgattatgctggttacccttatgacgtgcccgattacgccggctcttatccttatgacgtgccagattacgcaggctccggcgtgtttacccttgaagactttgtaggcgattggcgacaaacagcaggctataatttagatcaagtactcgaacagggtggcgtaagtagcctctttcaaaacctgggagtgtccgttactcctatacagcgcatagtattgtccggcgagaatggcctgaaaattgatatccacgttataataccatatgagggtctttccggtgaccaaatgggacagatcgagaaaatattcaaagtagtttaccctgtggacgaccaccacttcaaagttatcttacattatggaactctagtaatagacggcgtaacaccaaatatgatcgactacttcggccggccatatgaaggaattgctgtgtttgatgggaagaagattacagtcaccggtacgctgtggaatggaaacaaaataattgacgaacgacttataaacccagatggaagcctcctctttagagtgacaattaatggtgtgaccggttggaggctttgtgaacgaatcctcgcttaa

SEQ ID NO: 388 - DNA, 621 bp, Artificial Sequence
  Modified Open Reading Frame
atggccgtttatccctacgatgttcctgactatgccggctacccatatgacgtcccagattacgctgggtcctacccttacgacgtaccagattacgcaggctcgggcgtgtttacccttgaagactttgtgggcgattggagacaaaccgccggatacaatctcgatcaggtgctggaacagggcggcgtttcttcattatttcaaaacttgggcgtatccgtgacaccaatccagaggatagtattgtctggcgaaaatggcctcaaaatcgatatacatgtaattataccttacgaaggcttgagcggcgaccagatgggccaaattgagaagatattcaaagtcgtgtatccagtggatgaccatcatttcaaagtaattctacactatggcactcttgtaatagacggtgttactcccaacatgatagattatttcggtagaccatatgagggcattgcggtattcgatggcaagaaaatcactgtgacaggcaccctatggaacgggaacaaaataattgacgagcgtttgataaaccctgatggctccttactctttcgcgttactattaacggtgtcaccggatggagactttgtgaacgaattctggcataa

SEQ ID NO: 389 - DNA, 621 bp, Artificial Sequence
  Modified Open Reading Frame
atggccgtctatccatatgatgtaccagattatgccggctatccttacgacgttcctgactacgccggctcctacccatacgatgtgcccgactacgccggcagcggtgtattcacgttagaagactttgtaggcgattggagacaaaccgctggctataacctcgaccaagtactagaacagggcggtgtatcctcactcttccaaaaccttggcgtatctgtcactccaatacaacgaatcgtgctctctggcgaaaatggccttaaaatcgacatccatgtaatcatcccatatgaaggtttgtccggagaccaaatgggtcaaatagagaaaatattcaaggtagtgtacccagttgacgaccaccacttcaaggtgatactgcattatggcacgctagtcatagacggcgttacacctaacatgatagactacttcgggaggccctatgaaggaatcgccgtcttcgatggtaagaagatcactgtgacaggcaccctatggaacggcaacaaaattatagatgagagactgatcaatcctgacggttcattactgtttcgcgtaaccatcaacggtgtaacaggctggcgactatgtgaacgtattcttgcctaa

SEQ ID NO: 390 - DNA, 621 bp, Artificial Sequence
  Modified Open Reading Frame
atggcagtatacccttacgacgtccctgactatgccggctatccctacgatgtccctgattacgccggtagttatccttacgatgtgccggactatgccggaagtggagtatttaccctcgaagactttgtcggtgactggagacagacagcaggctataatctggatcaagttcttgaacaaggcggagttagtagtttattccaaaatctgggcgtatcggtgactccaatccaacgcatcgtcttgagcggagagaatggtcttaaaattgatattcatgtcattataccctatgaaggactgagcggtgaccagatgggtcagatagagaaaatatttaaagtagtttatcctgtggacgatcatcatttcaaagtcatattgcattatgggacgcttgttatcgacggagtgacaccaaacatgattgactatttcggacgaccctacgaaggaatagctgtatttgatggaaagaagataactgtgacaggcactctatggaatgggaacaaaattatcgatgaacggctcattaaccctgatggctctctactgttccgggtaacaattaacggcgtaaccggatggagactgtgcgagcgaatcctggcttaa

SEQ ID NO: 391 - DNA, 621 bp, Artificial Sequence
  Modified Open Reading Frame
atggccgtctacccttacgatgtaccagactatgccggatacccatatgatgtacctgattatgccggttcttatccgtatgatgtgcctgactacgctgggagtggagtgtttacccttgaagatttcgttggcgattggagacaaacagcaggctataatcttgatcaggtcctggagcaaggaggagtcagtagtctgttccagaacctgggagtatcagtgacacctatccaacgcatcgtcttgagtggagaaaacggactgaaaatagacattcatgttatcataccttacgagggtctaagtggagaccagatgggacagattgagaagatctttaaggtagtatatcctgttgatgatcaccactttaaggttattctacattacggtactttagttattgatggcgtaactcctaacatgatcgactactttggacgcccttacgagggaatagcagtgtttgatggaaagaaaatcaccgtaaccgggactctttggaatggaaataaaattattgacgaacgcttaataaatcctgatggctcgttgttgttccgtgtgactataaatggtgtgactgggtggcgtctttgtgaacggattctcgcataa

SEQ ID NO: 392 - DNA, 621 bp, Artificial Sequence
  Modified Open Reading Frame
atggccgtatatccctacgacgttcctgactatgctgggtatccttacgacgttcctgactatgctggttcctacccttatgacgtgcctgactatgctggaagtggagtattcacactggaagatttcgttggtgactggcggcaaacagcaggctataacttagaccaagtgctagaacaaggaggtgtgtcaagtctgtttcaaaacctcggagtatcggttacgcccatccaaagaatcgtcctatcaggagaaaacggactcaaaatcgatatacatgtgatcatcccgtacgaaggactttcgggtgaccagatgggtcagatagaaaagatcttcaaggtcgtgtacccggtggatgaccaccacttcaaagttattcttcactacggaaccctcgtgattgacggtgttactcccaacatgattgactatttcggaagaccctatgagggaatcgctgtctttgacggaaagaagattactgttactggcacattatggaatggaaacaaaattattgacgagagactgattaaccctgacggatcactgctctttagagtaactatcaatggagtgacaggctggagattatgtgaacggatacttgcctaa

SEQ ID NO: 393 - DNA, 621 bp, Artificial Sequence
  Modified Open Reading Frame
atggccgtgtatccctacgacgtcccagactatgccggttatccctacgacgtgccagactatgcaggtagttacccatatgacgttccagattacgccggtagcggcgtgttcacccttgaagactttgtaggtgattggcgacagacagccggctataatttagatcaagtgttagaacagggtggagttagttctttgtttcagaatctcggcgtgtcagtgacaccaatccaaagaattgtgctttcaggcgagaatgggctaaagatcgatatacatgtgataataccttatgaaggcctttccggagatcaaatgggccagatagaaaagatcttcaaagttgtatacccagtagacgaccatcatttcaaagttatattgcactatgggaccttagttatcgacggcgtaactccaaacatgatagactatttcggacgaccatacgagggaatagcagtgttcgatggcaagaagattaccgtaaccggcaccctatggaatggcaataagattatcgatgaacgactcattaatcccgatggcagcctattgtttcgtgtgaccattaatggcgtgactggatggaggctgtgtgaacgtattcttgcttaa

SEQ ID NO: 394 - DNA, 621 bp, Artificial Sequence
  Modified Open Reading Frame
atggcagtatacccatacgacgtacccgactacgcaggttatccatacgacgttccagactacgcaggatcctacccttatgacgttccagattacgccggcagcggtgtgtttactctagaagatttcgttggcgactggcgccaaaccgccggctataatttagatcaggtcctagaacaaggcggcgttagctccctattccaaaatttgggagtatcagttacacctattcagagaatcgtgttgtcaggagagaacggcttgaagatagatatccacgttatcataccctacgagggactttcaggagaccagatgggtcaaattgagaaaatctttaaagtggtttaccctgtggatgaccatcatttcaaagtgattctgcactacggtacgcttgtgatcgacggagttacaccaaatatgatagattactttggccggccctatgaaggaattgcagtgttcgatggaaagaagattacagtcacgggaactttgtggaacggcaacaaaattatcgacgaaaggctgatcaatcccgacgggagtttgttatttagggtcacaataaacggtgttacaggatggagactatgtgaacgaattcttgcctaa

SEQ ID NO: 395 - DNA, 621 bp, Artificial Sequence
  Modified Open Reading Frame
atggccgtatacccttatgatgtgccagactatgccgggtatccctacgatgtgcccgattatgctgggtcttatccatatgacgtccctgactatgctggctcgggcgtgtttactttagaggactttgtaggagactggaggcagacagctggttataacctcgaccaagtactcgaacaaggcggcgtaagttcattgtttcaaaacctgggcgtttcagtgacgcccattcaacgtatcgtactttctggtgaaaacggcttgaaaatagacatacatgttattattccatacgaaggactatctggcgaccaaatgggacaaatcgagaaaatatttaaagtagtgtacccagttgacgaccatcatttcaaagtaatcttgcattatggaactctagttatagacggcgtaactcctaatatgattgactatttcggaagaccatacgaaggcatcgcagtgttcgatgggaagaagataaccgttaccggcactctgtggaatgggaacaaaataatcgacgaacggctaataaatccggatgggtccctactctttcgtgtaaccatcaatggcgtgaccggatggaggctttgtgagaggatattagcctaa

SEQ ID NO: 396 - DNA, 621 bp, Artificial Sequence
  Modified Open Reading Frame
atggccgtctacccgtacgatgtccctgactatgccggatacccttatgacgtgccagattatgcagggtcctacccatacgatgtccctgattatgctgggagcggtgtgtttaccttggaagactttgtgggagactggagacaaacggctggctataacctcgatcaagtgctggagcaaggaggtgtgtcctctctatttcaaaacttaggcgtaagcgtgacaccaatacaaagaatcgtgctatcaggagaaaacgggcttaaaattgacatacatgttataattccatatgaagggctttccggtgatcagatgggacagatagaaaagatatttaaagtcgtgtaccctgtggacgaccaccacttcaaagtcatcttgcactacggaaccttggtgatcgacggtgtaactcctaacatgatagactactttggaagaccatatgaaggcatcgctgtattcgacggaaagaagataacggtaactggcaccttgtggaatggcaacaaaattatcgatgagcgtcttatcaaccctgacgggtccttattattccgcgttactattaatggcgtgaccggctggaggttatgcgagagaatcctagcttaa

SEQ ID NO: 397 - DNA, 621 bp, Artificial Sequence
  Modified Open Reading Frame
atggcagtgtacccatacgacgtgccagattacgcgggatatccctacgacgtgcctgactacgcgggtagttatccatacgatgtgcccgattatgcgggatccggagtatttacactggaagactttgtaggagactggcgccaaacagcaggttacaatctagatcaggtgctcgaacagggcggtgtcagctcattatttcaaaacctgggtgtatctgtaactccaattcagcgtatcgtactatccggagagaatggactcaagatagatatccatgttattatcccttacgaaggcttatcgggcgatcagatgggtcagatagaaaagatattcaaagtcgtttacccggtggatgaccatcatttcaaagtcattctgcattatggtacacttgtgattgatggcgttactcccaatatgatagactatttcggccggccctacgaagggatcgctgtctttgacgggaagaagataacggtaactggcacactttggaatggaaataaaataattgacgaaagacttattaaccctgatggatccctcctcttccgggttacgatcaatggagtgaccggctggcgtttgtgtgagaggattctggcttaa

SEQ ID NO: 398 - DNA, 621 bp, Artificial Sequence
  Modified Open Reading Frame
atggctgtgtatccttacgacgtgcccgactacgcgggctatccatatgatgtcccggactacgccggttcctatccgtatgatgtgcccgattatgcgggatcaggagtattcacactggaagactttgtgggcgattggcggcagactgccggatacaatttggaccaggtactggagcagggcggtgtctcatctctatttcaaaacctaggagtttctgttacaccaatccagcggatcgtactgtctggcgagaatggcctcaagattgatatacacgtgattatcccttatgaagggctgagtggagaccagatgggccagatcgaaaagatcttcaaggttgtctaccctgtggacgatcatcatttcaaggtgatcttgcactatggcactctggtgatagacggcgtaactccaaacatgatagactacttcggacgaccttacgagggcatcgctgtgttcgacggaaagaaaataacagttactggaacactctggaatgggaacaagatcatcgacgagaggctgattaatccagatggatcgttgctcttccgtgtgacaattaatggagtgactggatggcgactatgcgaacggatcctagcttaa

SEQ ID NO: 399 - DNA, 621 bp, Artificial Sequence
  Modified Open Reading Frame
atggcagtctacccgtatgacgtaccggactacgcgggatatccatacgatgttcccgactacgctggttcctacccatatgatgtacccgactacgccgggtccggagtgtttacattggaggatttcgtcggagactggaggcaaactgcagggtataatttagatcaagtgcttgagcaaggtggcgtatcgagcttatttcaaaatctaggcgtgtccgtaactccaatacagaggatcgttctcagcggcgaaaacggcctgaaaatagacatccatgtgattataccttatgagggactgagcggagatcagatgggacagatcgagaaaatatttaaagtggtttaccctgttgacgatcatcatttcaaagttatcctgcactatggaacactcgtcattgacggagttacacccaatatgattgattacttcggccgaccgtacgaaggcattgccgtgttcgacgggaagaagatcaccgtaacaggaaccttgtggaacggaaataaaatcatagacgaacgccttattaatccggacgggtctctgttgttcagagttacaataaacggagtgacgggttggcggctttgtgaacgaatattggcataa

SEQ ID NO: 400 - DNA, 621 bp, Artificial Sequence
  Modified Open Reading Frame
atggcagtatatccttacgacgtgccagattacgccggatacccgtatgatgttccggactacgccggttcttacccttacgacgtgcctgattatgctgggtcaggagtatttactttagaagactttgtgggcgattggcggcagacggccggttataatctggaccaggtgctggagcaaggaggagtctcgagtctgttccagaatttaggagtatctgtgacacccatacagcgtatcgtgttgagcggagagaacggtcttaaaatcgatatccatgtgataatcccgtacgaaggtctgtcaggcgaccaaatgggacaaatcgagaaaatctttaaggtggtctaccctgtagacgaccaccactttaaggtgattctgcattatggcaccctggtgattgacggcgtaacacctaatatgattgattactttggccggccatatgagggtatagcagtattcgacgggaagaaaatcactgtgaccgggaccctatggaatggcaacaaaataattgacgaacgcttaatcaatcccgatggttctttgctgttccgagtgacaattaatggcgtcacaggttggaggctttgtgaacgaatcctggcataa

SEQ ID NO: 401 - DNA, 621 bp, Artificial Sequence
  Modified Open Reading Frame
atggcggtgtacccgtatgacgtgccggactacgcgggctacccttatgatgttcccgattatgcaggcagttatccttacgatgtaccagactacgcaggttcgggtgtgtttacattagaggactttgtgggcgactggaggcaaacggccgggtataatcttgatcaggtactcgaacagggcggagtatctagcttgtttcaaaacctcggcgtgagtgtaactccaattcagcggatagtactttcaggagagaacggactcaaaatagacatacacgtgataataccctatgaaggtttatcaggagaccaaatgggccagatcgaaaagatattcaaggtagtgtatcccgtggatgaccaccacttcaaagttatccttcactatgggacactggtcatagacggagtcacgcccaatatgattgattacttcggcagaccttatgagggaatcgctgtctttgatggcaagaagattactgtgacgggcacactctggaacggcaacaagatcatagacgagcggctaattaacccagatggctcattattgtttagggttactatcaacggcgtgacagggtggcgcctgtgtgagcgtattctagcgtaa

SEQ ID NO: 402 - DNA, 621 bp, Artificial Sequence
  Modified Open Reading Frame
atggcagtatacccttacgacgtgccggactatgcaggatacccatatgacgtcccggactacgcaggcagttatccctacgacgtgcccgattatgccggcagcggtgtgtttacattagaagactttgttggagattggagacagacagccgggtacaatttggatcaggttcttgagcaaggcggagtatcaagtctatttcaaaatttaggagtttctgttacacccatccaacgcatagtactaagtggagagaacggactcaaaattgacatacacgtaatcatcccttacgagggcttgagtggcgatcagatgggacagatcgagaagatcttcaaagtggtttacccagtagatgaccaccatttcaaggttatattgcactacgggactctagtaattgacggcgtgacacccaacatgatagattactttggtcgcccgtacgaaggtattgcggtgtttgacgggaagaaaataacggttacaggtactttatggaatggcaataaaatcattgatgaaagacttatcaatccagatggaagtctcttattccgggttaccataaatggcgtaacagggtggcggctgtgtgaacggatactggcttaa

SEQ ID NO: 403 - DNA, 621 bp, Artificial Sequence
  Modified Open Reading Frame
atggctgtctacccttatgacgtgcccgactacgcgggatatccttacgatgtgccagactatgctggctcttatccatatgatgtcccagactacgcaggaagcggcgtatttaccttagaggactttgtgggcgattggagacagaccgcaggttataatttggaccaagtattggagcagggaggtgtgagctcactgtttcagaacctcggtgtgagtgtgacgcctattcagcggatcgtactgagcggagagaatggcctgaaaatcgacatacatgtgattattccatatgaaggactgtccggcgaccagatgggacaaattgagaagatcttcaaagtggtctacccagtcgatgaccaccacttcaaggttatattacactacgggacccttgtgatcgacggagttactcccaatatgatagactatttcggcaggccctatgaaggcatcgcagtgtttgatggaaagaagataacggtcacgggcactctatggaacggtaataagataatagatgagagattgataaatcccgacggttccctcttatttcgtgtcacgataaatggtgttactgggtggagactctgtgagaggatccttgcataa

SEQ ID NO: 404 - DNA, 621 bp, Artificial Sequence
  Modified Open Reading Frame
atggcagtgtatccctacgacgttccagattacgccgggtatccatacgacgtgccagactatgcgggcagttatccatacgatgttccggactacgccggctcaggcgtcttcaccctggaggactttgttggagattggcgacaaactgccgggtacaacctggaccaggtattggagcagggaggagtgtcgagcttgtttcaaaacctcggtgtatcagtgactcctatccaacgcatcgtgctgtccggagagaacggtctgaagatcgatattcacgtcatcatcccatacgagggactgtcaggagatcagatgggccaaattgagaagatatttaaagtagtatatcccgtcgacgaccaccactttaaagtcatactacactatggaacactcgtgatcgatggcgtcactccgaatatgatagactactttgggcggccctacgaaggtattgcagtctttgatggcaagaaaattacagtaacgggtacactatggaatggcaacaaaatcattgatgagagattaattaatcctgacgggtctctgctatttcgtgtcacaatcaatggagtaacgggatggaggctttgcgaacggatattggcataa

SEQ ID NO: 405 - DNA, 621 bp, Artificial Sequence
  Modified Open Reading Frame
atggcagtctatccttatgatgtgcctgattacgctggttatccatatgacgtgccggactacgctgggagctacccttacgatgttcccgattacgcaggctcaggcgtcttcaccctggaagatttcgtgggagactggaggcagactgcagggtacaatctggaccaggtattggaacagggaggagtgagttctctatttcagaatctaggcgtgtcagtaacacctatccaacgaatagtgctgtcaggcgaaaacggtctgaaaatagacatacacgtgatcatcccttacgagggtctcagcggcgaccaaatgggacaaatagaaaagatatttaaggtggtgtacccggtcgatgatcatcacttcaaggtgatattgcattatggtacacttgtaatcgatggagtcacacccaatatgatcgactactttgggcgtccctacgagggaatcgcagtatttgacgggaagaagattacggtgacagggaccctatggaacggcaacaagataatcgatgaacgactgatcaaccctgacggctctcttctatttcgcgttactattaatggagttacagggtggaggttgtgtgagagaatattagcttaa

SEQ ID NO: 406 - DNA, 621 bp, Artificial Sequence
  Modified Open Reading Frame
atggccgtgtatccttacgacgtgccggactacgcaggatacccatatgacgttccagattatgcaggatcttatccttatgatgtgcccgactacgcagggagcggagtatttacactcgaggactttgtgggcgattggcggcagactgcgggttataatctcgaccaggtccttgagcagggaggagtgtcgtcgctctttcagaatctcggcgtctcagttactccaatccagcgaatcgtattaagtggagaaaatggcctcaaaattgacatacatgtgattatcccttatgagggcctttcaggcgatcaaatgggccagattgagaaaatatttaaggtcgtgtatccggtcgacgatcatcacttcaaggtcatattacactatgggacactggtgatagacggcgtaactccaaatatgatcgattactttggcaggccttatgagggtattgcagtcttcgacggaaagaaaataacagtaaccggaaccctttggaacgggaacaagataatcgatgaacgtctaataaacccagacggaagcctgttatttcgtgtgacaatcaatggcgtgactgggtggagattatgcgaacgaattctggcgtaa

SEQ ID NO: 407 - DNA, 621 bp, Artificial Sequence
  Modified Open Reading Frame
atggcggtctatccatatgatgtacctgattatgccgggtatccttatgacgtgcctgactacgccggcagctatccgtatgatgtaccggactacgctgggagcggcgtgtttacgctggaggactttgtgggcgattggagacaaacagcgggctacaatttggatcaggtgctggagcagggcggtgtgtcctcattgtttcagaaccttggcgtatccgttacacctatccagcggatcgtcctctccggagagaacggacttaaaattgacatacatgtgattattccctatgaaggcttgtctggtgaccagatgggccaaatcgagaagatcttcaaagtagtgtatcccgtagacgaccatcactttaaggtgatcttacactacggaaccctggtaattgacggagttactccgaacatgattgattatttcgggcgtccttatgaagggatcgcggtgtttgacggaaagaagataactgtaacgggcaccttatggaacggaaacaagattattgacgaaagattgatcaaccctgacggaagcctgctcttccgggtgacaattaacggtgtcaccggttggcgtctgtgtgagaggatccttgcataa

SEQ ID NO: 408 - DNA, 621 bp, Artificial Sequence
  Modified Open Reading Frame
atggccgtgtatccttacgacgttcccgactatgcgggctacccttacgacgtcccagattatgcagggagctatccctacgacgtgccagactatgccggatctggcgtattcaccttagaagatttcgtgggtgactggaggcagaccgccgggtataacttggatcaggtgctggaacagggaggcgtttccagtttattccagaacctcggcgtaagcgttacgcctattcagaggattgtcctctcgggagaaaatggactgaagatcgacattcatgtgatcataccctatgaaggcctgtccggcgatcaaatgggacaaattgagaagatattcaaggttgtctatcccgtggacgaccatcatttcaaagtcatattgcactatgggaccctcgtaatagacggagtcactccgaacatgattgactatttcgggcgtccctatgaaggcatagccgtctttgacgggaagaaaattactgttacaggaactctgtggaacgggaataagatcatcgatgagcggcttattaacccggatggatccctgttgttccgggtgactataaatggagtcaccggttggcgactgtgcgaaaggattctggcgtaa

SEQ ID NO: 409 - DNA, 621 bp, Artificial Sequence
  Modified Open Reading Frame
atggccgtctatccttatgatgtacccgattacgcaggctatccttatgatgtgcctgactatgccggtagttatccctacgacgtgcccgactacgcaggatcaggagtattcacccttgaggactttgtaggtgactggagacagactgccgggtacaacttagatcaagttctcgagcagggaggtgtctccagtctgtttcagaatctcggagtcagcgtgactcccattcagagaatcgttctgagtggcgaaaatggtctaaagatagacatacatgtaattataccctacgaagggttaagcggcgaccaaatgggccaaattgaaaagatattcaaggtggtttatcccgtagacgaccaccactttaaggtcattctccattacggaacactagtgattgacggcgttacgccaaatatgatagattacttcggtcgcccttatgagggcatcgctgtattcgacggtaagaagatcacagtcaccggaacactgtggaacggcaacaaaattatagacgaaagactgatcaatccggatggctcactcctgtttcgcgttacaattaacggagtcaccggttggcggttatgcgagcgaatcctcgcataa

SEQ ID NO: 410 - DNA, 621 bp, Artificial Sequence
  Modified Open Reading Frame
atggcggtttatccttatgatgtacctgattacgcaggttacccatatgatgtaccagactatgcagggagctatccctacgatgttccggactacgccgggtctggcgtcttcacattagaagacttcgtcggcgactggaggcaaaccgctggatacaatctggatcaagttctcgaacagggcggagtgagcagcctgtttcagaacctcggtgtctccgtaactccaatacaacggatagtgctttcaggcgagaacggcctgaaaattgatatccacgttatcatcccgtatgaaggcctctctggcgatcagatgggacagattgagaaaatattcaaggtggtgtatcccgtcgatgatcatcatttcaaggtcatcctccattacggaactctggtaattgacggcgtgacacccaatatgatcgactatttcggtcggccgtacgaaggcattgcggtcttcgacggcaagaagattacggtaactggcaccctatggaatgggaacaagattatagatgaacgattgatcaatccggacggaagcctcttattccgcgtgacgatcaacggagtcacgggatggaggctttgcgagagaatactggcgtaa

SEQ ID NO: 411 - DNA, 621 bp, Artificial Sequence
  Modified Open Reading Frame
atggccgtatacccgtacgacgttccagattacgctggttacccatatgacgtacccgactacgccgggtcttatccctacgatgtcccggattatgccgggagtggcgtattcaccttagaagatttcgtaggcgactggcggcagactgccgggtataacctcgatcaggttctggaacagggtggagtatcatcactgtttcaaaacctaggcgtgtccgtgactccaattcaacgcatcgtgttgagcggagaaaatggactcaaaattgatattcatgtgataatcccttacgaaggcctatccggagatcagatgggtcaaatcgaaaagatctttaaggtcgtctacccggttgacgatcaccacttcaaggtcatattgcactatggcacccttgtaattgatggagttactccaaatatgatagactatttcggacgtccttatgaaggcatcgctgtcttcgacggcaagaagatcacagtgaccgggactctttggaacggcaacaaaatcatagatgaacggttaattaaccctgacggctcgcttctctttcgcgttacaattaacggcgtaactgggtggcgattatgcgagcggatactcgcttaa

SEQ ID NO: 412 - DNA, 621 bp, Artificial Sequence
  Modified Open Reading Frame
atggcagtatacccttacgacgtccctgactacgcaggctatccatacgacgttcccgactatgccggatcttacccatatgacgtacctgattacgctgggtctggcgtgtttaccctagaggacttcgtgggtgattggcgacagaccgcaggatataacctggatcaagtactggaacaaggaggagttagttctctgttccagaatcttggcgtcagcgttactccaattcagcgcatcgtgctgagtggcgagaatggactgaaaatcgatattcacgttattattccttatgaaggcctctccggcgaccagatgggccagatagagaaaatcttcaaggtggtctacccggtcgatgaccaccatttcaaggtcatattgcactatggcacactcgtgatagacggtgttacgccaaacatgattgactactttgggcgcccttatgaaggaattgcggtcttcgatggaaagaagatcactgtgaccgggaccctctggaacggaaataagattattgatgagagactcatcaatccagacggcagtttactcttccgcgtgacaatcaatggtgttacaggttggaggttatgtgagagaatacttgcataa

SEQ ID NO: 413 - DNA, 621 bp, Artificial Sequence
  Modified Open Reading Frame
atggctgtatacccatatgatgtcccggactatgcgggatatccttacgacgtaccagactacgccggatcgtacccatacgatgtaccggactacgcgggctccggcgtgttcacgcttgaggacttcgtcggagactggagacagactgcgggttataaccttgaccaagtattggaacagggcggcgtgagctctttgtttcagaatctaggcgtttcagtgacgccaatccaacgaatcgtactgtccggagaaaacggactcaagattgatatacatgttattatcccatatgaaggactgtccggagatcaaatgggacaaattgaaaagatctttaaggtggtgtaccctgtcgacgaccaccactttaaagtaatattacactacgggacacttgtgatcgatggagtcactcctaacatgatcgattacttcggcaggccatatgagggcattgccgtattcgacggcaagaaaataaccgtgactggcactctatggaacggaaacaagatcatagacgaacgattaattaatcctgacggatctctcctgtttcgagtcaccattaatggtgtaacagggtggcggctctgtgagagaatcttggcgtaa

SEQ ID NO: 414 - DNA, 621 bp, Artificial Sequence
  Modified Open Reading Frame
atggccgtttacccgtatgatgttccggactacgctggttatccgtacgatgtgcctgattatgcaggatcatatccttacgacgttccagactatgccgggagcggagtcttcacccttgaagacttcgtaggcgactggaggcaaaccgccggctacaatctggaccaggtcctggaacaaggcggcgtatcctccctattccaaaatctcggagtttcagtaactcccatccagaggatcgtcctgagcggcgagaacggcctcaaaattgacatacacgtgataattccatacgaaggtctgtccggagatcagatgggacagatcgaaaagatatttaaggtagtgtatcctgtagacgatcaccactttaaagtaatcctacactatgggaccttagtcatcgatggcgtgactccgaacatgatagattatttcggccgcccttatgagggcattgcagtgtttgatggaaagaagataaccgtgaccggtaccttatggaacggcaacaagattatcgacgagagattaatcaatcccgatggtagcctcttattcagggtgactatcaacggagtaacgggatggcgactgtgcgaaagaatactggcttaa

SEQ ID NO: 415 - DNA, 621 bp, Artificial Sequence
  Modified Open Reading Frame
atggcggtttacccatatgatgtgccagactatgccgggtatccatacgatgtgcctgattatgcgggcagctacccgtacgacgtacccgactacgccggttctggagtgtttacactcgaggatttcgtcggcgactggcgacaaactgctggctataacctggaccaggtcctggagcagggaggcgtttctagcctgttccagaatcttggtgtttcggtaacaccaatacagagaatcgttctctcaggcgagaacggattaaagatagatatccacgtgatcattccctacgagggattgagcggtgaccagatgggtcagattgagaaaatcttcaaggtggtgtatcccgtcgatgaccaccactttaaggtcatactgcactatggaaccttagttattgatggagttactcccaatatgatagactactttgggaggccttacgaaggcattgccgtattcgacggtaagaaaattaccgttaccggcacattgtggaacggaaacaagataattgacgaacgattaatcaatccagacggatccctcctattccgtgtgactatcaacggagtcacaggatggagactgtgcgagagaatcctagcctaa

SEQ ID NO: 416 - DNA, 621 bp, Artificial Sequence
  Modified Open Reading Frame
atggcagtttacccatacgacgtgcctgactacgcaggttacccttacgacgtgccagattacgccgggtcctacccttatgacgtgcccgactacgctggcagtggcgtctttaccctcgaggacttcgttggagactggaggcaaactgctggctacaaccttgaccaggtccttgaacagggtggcgtgagttcactcttccaaaaccttggagtgagtgtgacgcctattcaacgtatagtgctatccggcgagaatgggctgaaaattgacatacatgtgattataccctacgaagggctttctggagaccaaatgggccagatcgagaagatctttaaagtggtgtacccagtcgacgaccatcactttaaagtcatattgcactacgggacccttgtcatcgacggagtaactccaaacatgattgattacttcggccgaccttacgagggtattgccgtgtttgatggaaagaagattacagtgactggaacgctgtggaatgggaataagatcatcgacgaaagactcattaatcctgacggctccttactgttccgggtgaccataaatggtgtgaccggctggcgcctgtgcgagcgcatcctggcttaa

SEQ ID NO: 417 - DNA, 621 bp, Artificial Sequence
  Modified Open Reading Frame
atggctgtgtacccatatgatgtaccagattatgcaggatacccatatgatgtgccggattatgcgggaagctatccctatgatgtacctgactatgcaggatctggagtgttcacactggaggactttgtaggagactggcgccagactgctggatacaatctggaccaggtgctggaacagggaggagtgagctcgctgtttcaaaatttgggtgtatcagtgacacccattcaacggatagtactgagtggagagaatggactgaagatagacattcatgtgatcattccctatgaaggcctgtcaggtgaccagatgggccaaatagagaaaatattcaaggtggtgtatccagtggatgatcaccacttcaaagtgattctccattatggcacactggtgatagatggagtgactcccaacatgatagattactttggccggccttatgagggaatagctgtgtttgatgggaagaagatcacagtgactgggaccctgtggaatggaaacaagatcatagatgaacgcctgatcaaccctgatggcagcctcctgttccgggtgaccataaatggtgtgacgggatggagattgtgtgagagaattctagcctaa

SEQ ID NO: 418 - DNA, 621 bp, Artificial Sequence
  Modified Open Reading Frame
atggctgtttatccatatgatgtccctgattatgcaggatatccctatgatgttccagactatgctggaagctacccatatgatgtgcctgattacgcaggatcaggtgtgttcaccctggaggactttgtaggagactggcgccagacagcaggctacaacctggatcaggtgctggagcaaggaggagtctcctccttatttcaaaatctaggtgtctcagtgacaccgatccagaggatagtgctctcaggagagaatggcctgaaaatagacattcatgtcatcataccctatgaaggactgagtggagaccagatgggccaaatagagaagatattcaaggtggtgtatccggtggatgaccaccatttcaaagtcatcctgcattatggaacattggtgatagatggagtgacacccaacatgatagactactttggccggccctatgaaggcatagctgtgtttgacgggaagaagataactgtgactgggacactgtggaatggaaacaagatcatagatgagaggctgatcaaccctgatggctcactgttgttccgagtgaccataaatggagtaacaggatggcggctgtgtgagcgaatcttggcctaa

SEQ ID NO: 419 - DNA, 621 bp, Artificial Sequence
  Modified Open Reading Frame
atggcagtatacccatatgatgtgcctgattatgctggctatccctatgatgtcccagactatgcaggatcctatccctatgatgtgccggattatgcaggctcaggtgtgtttaccctggaggatttcgtgggagactggcgccagactgctggatacaatctggaccaagtcctagagcagggtggtgtttcctcactgttccagaacctgggagtgagtgtgacgcccatacaacgcattgtcctgtcaggtgagaatggcctgaagattgacattcatgtgataattccttatgaagggctttcaggagatcagatgggccagatagagaagatattcaaagtggtgtatcctgtggatgaccatcacttcaaagtcatactgcactatggaacactggtgatagatggagtcacacccaacatgattgactatttcgggcgcccatatgaagggattgcagtctttgatgggaagaagatcacagtgacgggcaccctgtggaatgggaacaagatcatagatgagcgcctgataaacccggatggctcgcttctatttcgagtgaccatcaatggagtgactggatggcggctctgtgagaggattctggcctaa

SEQ ID NO: 420 - DNA, 621 bp, Artificial Sequence
  Modified Open Reading Frame
atggctgtgtatccatatgatgtgcctgactatgcaggctatccctatgatgtgccagattatgcaggatcatatccctatgatgtcccggactatgcaggatcaggtgtgttcaccctggaagactttgtgggagactggagacagacggctggatacaatttggatcaggtcctggaacaaggtggagtgagcagcctctttcagaatctgggtgtgtctgtgacgcccatccagcggatagttctgagtggagagaatggactcaagattgacattcacgtcatcattccctatgagggactctcaggagaccagatgggacagattgagaagatattcaaggtagtgtatccagttgatgaccatcatttcaaagtaatactgcactatggaactctggtgatagatggtgtgacacccaacatgatagattactttggacgaccatatgagggaatagcagtctttgatggaaagaagatcacagtgacagggaccctatggaatggaaacaagatcatagatgaacggctgatcaacccagatggatccctgctgtttcgggtgaccatcaatggagtgacgggatggcgactgtgtgaacggatcctagcataa

SEQ ID NO: 421 - DNA, 621 bp, Artificial Sequence
  Modified Open Reading Frame
atggctgtctacccatatgatgttccggactatgcaggctatccatatgatgtgcctgattatgctggatcctatccatatgatgttccggattatgctggatctggtgtgttcacactggaagactttgtgggtgattggcgacagacagcaggatacaacctggaccaggttctggagcagggtggagtgtcatccctgttccagaacctgggagtgtctgtgacaccaattcagcgaattgtattatcgggagaaaatggcctcaagatagacatacatgtgatcattccctatgaaggactgtcaggagaccagatgggccagattgagaagatattcaaagtagtatatccggtggatgaccaccacttcaaagtgatactccactatggaacactggtgatagatggagtgacgccgaatatgatagattatttcggacggccctatgagggcatagcagtgtttgatgggaagaagatcacagtgactgggaccctgtggaatggaaacaagatcatagatgagagattgatcaacccggatgggagccttctgttcagagtgaccataaatggtgtgacaggctggaggctttgtgaacgcatcctggcataa

SEQ ID NO: 422 - DNA, 621 bp, Artificial Sequence
  Modified Open Reading Frame
atggctgtgtatccatatgatgtgccagactatgcgggatatccctatgatgttccagattatgctggatcctacccatatgatgtaccggactatgctggatcaggtgtgttcaccctagaagactttgtaggagattggcggcagacagcaggctacaatctggatcaagtgctggaacaaggaggtgtctcatcactcttccagaatctgggtgtctctgtgacacccatacaacgcattgtcctgtctggagagaatggactgaaaatagacatacatgtgatcattccatatgaaggcctttcgggagaccaaatgggccagatagagaaaatattcaaagtggtatatccggtggatgaccaccatttcaaggtcattcttcattatggaacactggtgatagatggagtgactcccaacatgatagattatttcggccggccctatgagggaatagcagtatttgatggaaagaaaatcactgtcacaggaaccctatggaatgggaacaaaattattgatgagcgactgatcaacccagatggctcgctgctgtttcgtgtgaccatcaatggtgtgacgggctggcgactttgtgaaaggatattggcctaa

SEQ ID NO: 423 - DNA, 621 bp, Artificial Sequence
  Modified Open Reading Frame
atggcggtgtacccatatgatgtgcctgactatgcaggatatccctatgatgtaccggactatgctggaagctacccgtatgatgtacctgattacgcaggatcaggtgtgttcaccctggaagatttcgtgggagactggcgccagacagcaggctacaacctggaccaggtgctggagcagggtggtgtgtcatcgctctttcagaatttaggtgtcagtgtgacacccattcagaggatagtgttgtcaggagagaatggcctgaaaatagacattcatgtgatcattccctatgagggcctgtctggagaccagatgggacagatagaaaagatcttcaaggtggtatatccagtggatgaccatcacttcaaggtgattctgcattatggaaccctagtgatagatggtgtgacacccaacatgattgattacttcggaagaccctatgagggcatagcagtgtttgatggcaagaagataacagtgacagggactctgtggaatggaaacaaaatcatagatgaacgactcataaaccctgatggctcacttctgttccgagtgaccataaatggagtgacaggctggcggctgtgtgagagaatactggcataa

SEQ ID NO: 424 - DNA, 621 bp, Artificial Sequence
  Modified Open Reading Frame
atggctgtctacccatatgatgttcctgactatgctggatatccctatgatgtgcctgattatgctggaagctatccctatgatgtgccagattatgcgggatcgggagtcttcaccttggaagactttgtaggtgactggcggcagacagctggctacaatctggaccaggtactggaacaaggaggagtgtcatcgctgtttcaaaatttgggagtgtctgtgacacccatccagaggatagtcctgtcaggagagaatggcctgaagattgacatacatgtcatcataccctatgagggcctgtcaggagaccagatgggccaaatagagaaaatcttcaaggtggtgtacccagttgatgatcatcatttcaaggtgatcctgcattatgggacattggtgatagatggagtcacacccaacatgatagactactttggccgtccctatgaagggatagctgtatttgatgggaagaagataactgtgactgggacactgtggaatggaaacaaaataatagatgagcgcctgatcaacccagatggctccctgctgtttcgggtgaccatcaacggagtgacgggatggcggctgtgtgagagaattctcgcataa

SEQ ID NO: 425 - DNA, 621 bp, Artificial Sequence
  Modified Open Reading Frame
atggcagtgtacccatatgatgtgccagattatgctggctatccctatgatgtgcctgattatgctgggagctatccgtatgatgttccggactatgcagggagtggagtcttcacactggaggatttcgtcggagattggcggcaaacggctggatacaatctggaccaggtgctggagcagggtggagtgagcagcctgtttcagaatttgggagtttctgtgacgcccattcagaggatagttctgtcaggtgagaatgggctgaagattgacattcatgtgatcataccatatgagggcctgagtggagatcagatgggccagatagagaaaatcttcaaggtggtgtaccctgtggatgatcaccatttcaaggtgatcctgcactatgggaccttggtgatagatggagtcacaccgaacatgatagattactttggacggccctatgaaggcattgcagtgtttgatggcaagaagatcacggtgacagggacgctatggaatggaaacaagatcattgatgagagactaatcaatccggatggatcgcttctgtttcgggtgaccatcaatggtgtgacaggctggcgcctatgtgaacgaatcctagcctaa

SEQ ID NO: 426 - DNA, 621 bp, Artificial Sequence
  Modified Open Reading Frame
atggctgtgtatccctatgatgtcccagactatgcaggctatccctatgatgtgccagattatgctggatcctacccatatgatgttcctgactatgctggatctggtgtattcaccttggaagactttgtgggtgattggagacagacggcgggatacaatctggaccaagtgttggaacagggaggtgtctcatccctctttcagaacctgggtgtatcggtcacgcccatccagaggattgtcttgtcaggtgagaatggattgaagatagacatccatgtgataattccatatgaagggctatcaggagaccagatgggccagatagagaagatattcaaggtggtgtacccagtggatgatcatcatttcaaagtgattctgcattatggaaccttagtgatcgacggtgtcacgcccaacatgatagattactttggacggccatacgagggaatagcagtgtttgatggaaagaagatcacggtgactgggacactgtggaatggcaacaagataattgacgagcgcctgataaatccagatggaagcctgctgttccgagtgaccatcaatggtgtgacaggatggcgattatgtgagcggatcttggcctaa

SEQ ID NO: 427 - DNA, 621 bp, Artificial Sequence
  Modified Open Reading Frame
atggccgtttacccttatgacgtgcccgattatgccgggtacccgtatgacgtgcctgactacgccggtagttatccttatgacgtacccgactacgccggtagcggcgtgtttactctcgaggacttcgtgggagattggagacaaaccgccggttataatctcgatcaagtcctcgagcagggcggcgtaagctctttgttccagaatctcggcgtcagcgtcacgccaatccagcgtatcgtgcttagcggcgaaaacgggcttaagatcgatatccacgttattatcccttacgagggtcttagcggcgatcagatgggtcagatcgaaaagatctttaaggtcgtgtacccggtcgacgaccaccactttaaagtcattctgcattacggtacgcttgtaatcgatggcgttacacctaatatgattgactacttcggtagaccttacgagggtattgccgtgttcgacggcaagaaaattaccgttaccggtactttatggaacggtaataagattatcgacgagaggcttattaatcccgacggaagcctcctctttagggttactattaatggcgttaccgggtggcggctgtgcgaacgtatcctggcttaa

SEQ ID NO: 428 - DNA, 621 bp, Artificial Sequence
  Modified Open Reading Frame
atggccgtgtatccgtacgacgttcctgactacgccggttatccttacgacgtgccggattacgccggtagttatccttacgacgtgcccgattacgccggtagcggtgtgtttactttagaagatttcgtaggcgactggcgtcagacagccgggtataacctcgatcaagtactcgagcaaggcggcgtcagttctctctttcaaaacttaggagtcagcgttactcctatccagcggatcgtcctgagcggcgaaaacggtctcaaaatcgatatccacgttattatcccttacgagggtcttagcggagatcagatgggccaaatcgagaaaatctttaaggtagtctatcccgttgacgaccaccacttcaaagttatcttgcactacggtactctcgtgatcgacggcgttactcctaacatgatcgactatttcggtagaccttacgagggtatcgccgtgttcgacggcaagaaaattaccgtaaccggcactttgtggaacggtaataaaattattgacgaacgtctcattaatcccgacggttctttactctttagggttactattaacggcgttaccggttggaggttatgcgaacgtatcctcgcataa

SEQ ID NO: 429 - DNA, 621 bp, Artificial Sequence
  Modified Open Reading Frame
atggctgtgtatccttacgacgtacccgactacgccggttatccttacgacgttccagattacgcaggcagttatccatacgacgttcccgattacgccggtagcggcgtctttactctggaagacttcgtcggagactggcggcagacagccggttataacctcgaccaggtacttgaacaaggcggcgttagcagtctgtttcagaacctcggcgttagcgttactccaattcagcgtatcgtgcttagcggcgaaaacggtcttaagatcgacattcacgttattataccttacgagggtctcagcggcgaccaaatgggtcaaattgagaaaatctttaaagtcgtgtatcccgtcgacgaccatcactttaaggttatcctccactacggtactctcgttatcgacggtgttactccaaatatgatagactatttcggccggccttacgaaggcattgcagtctttgacggtaagaagattaccgttaccggcacgttatggaacggtaacaaaattatcgacgaacgtcttattaatcccgacggttctctcctctttagagttactattaacggcgtgaccggttggagattatgcgagcgtattctcgcctaa

SEQ ID NO: 430 - DNA, 621 bp, Artificial Sequence
  Modified Open Reading Frame
atggccgtatatccttacgacgttcccgactacgccgggtatccgtacgacgtacccgactacgccgggtcttatccgtacgacgtacccgactacgccggttccggcgtctttactctcgaagacttcgtcggcgactggcgccaaactgccgggtataacctcgaccaagtattagagcaaggcggcgtcagcagcttattccaaaaccttggcgtttccgttactccaatccagcgtatcgtgcttagcggcgaaaacggcttaaagatcgatatccacgttataataccctatgagggtctttccggcgatcaaatgggtcaaatcgagaagatctttaaggtcgtctaccctgtcgatgaccaccactttaaggttatcctgcactacggtactttggttatcgatggcgttactcctaatatgatcgattacttcggtagaccctacgaaggtatcgccgtctttgacggcaagaaaatcaccgttaccggtaccctgtggaacggcaataagattatcgacgaacgacttatcaatcctgatggttctctgctgtttagggttacaattaacggcgttaccggttggaggttatgcgagcgtattctcgcttaa

SEQ ID NO: 431 - DNA, 621 bp, Artificial Sequence
  Modified Open Reading Frame
atggctgtgtacccgtacgatgtgccagactacgccgggtacccttacgatgttcccgactacgccggctcttatccttacgacgttcccgattacgccggtagcggcgtatttaccctggaggatttcgttggcgactggcgccaaacggctggttacaaccttgatcaggtactcgaacagggcggcgttagtagtctgttccaaaacctcggcgttagtgttactcctattcagcgtatcgtgttatccggcgagaacggtttaaagatcgatattcacgttataataccttacgaaggcctcagcggcgatcaaatgggtcagatcgagaaaatctttaaagttgtttatcccgttgacgatcaccactttaaagttatactgcactacggtactttagttatcgacggcgttacgcctaatatgatcgactacttcggccgaccttatgagggtatcgccgtgttcgacggaaagaaaattaccgttaccggtaccctctggaacggtaataaaattatcgacgagaggcttattaatcccgacgggtctttattatttcgcgttacaattaacggcgttaccggctggaggttatgcgaaaggatactagcgtaa

SEQ ID NO: 432 - DNA, 621 bp, Artificial Sequence
  Modified Open Reading Frame
atggctgtctacccttacgacgtgcccgactacgccggatatccgtacgacgtgcccgattatgccgggtcttatccttacgacgtacccgattacgccggtagcggcgtatttaccctggaagacttcgttggagattggcggcagaccgcagggtataacctcgatcaggtgctcgaacagggcggcgtctctagtctctttcaaaacctcggcgtgagcgttactccaatccagcgcattgtccttagcggcgaaaacggtcttaagatcgatatccacgttattattccttacgagggtctgtcaggcgatcaaatgggccaaatcgaaaagatctttaaggttgtgtaccctgtcgacgaccaccatttcaaagttattctccattacggtactctcgttatcgacggcgttactccaaatatgatcgattatttcggaagaccttacgagggtatcgcggtgttcgacggtaagaaaataaccgttaccggtactttatggaacggtaataagattatcgacgagagacttattaatccggacggttctttgttgtttagagttactattaacggcgttaccggctggagactgtgcgaaaggatccttgcgtaa

SEQ ID NO: 433 - DNA, 621 bp, Artificial Sequence
  Modified Open Reading Frame
atggccgtctacccttacgacgttcctgactacgccgggtatccatacgacgtcccggattacgcaggttcttacccttacgatgtgcccgactacgccggtagcggcgtatttacgttagaggacttcgttggcgattggcggcaaaccgccggctataacctcgaccaggtcctggaacagggtggcgttagttcgttgtttcaaaatctcggcgttagtgtaacaccaatccagcgcatcgttctgtccggcgaaaacggccttaaaatcgacatccacgttattattccttacgaaggtcttagcggcgatcaaatgggccaaatcgagaaaatctttaaagttgtatatcccgttgacgatcatcactttaaggttatcctccactacggtacactcgttatcgacggcgttactcctaatatgattgactacttcggccgtccgtacgagggaattgccgtcttcgacggcaagaaaattacagttaccggtacgttgtggaacggcaataagattatcgacgaacgtcttattaatcccgacggtagcttgttatttagagttacaattaacggcgttaccgggtggaggctctgcgaaaggatactcgcctaa

SEQ ID NO: 434 - DNA, 621 bp, Artificial Sequence
  Modified Open Reading Frame
atggccgtttatccttacgacgttcccgattacgccggatacccttacgacgtaccagactacgccgggtcgtatccttatgacgtcccagattacgccggcagcggcgtgtttaccctcgaggatttcgtcggcgattggcgtcaaaccgccggttataatcttgaccaagtgctcgaacaaggcggcgtgtctagcctcttccaaaacctcggcgtgtcagttacgccgatccaacgcatcgtactgtccggcgaaaacggccttaaaatcgatattcacgttattatcccgtacgaaggtttgtccggcgaccagatgggtcaaattgagaagatattcaaagtcgtgtatcccgtcgacgatcaccactttaaagttatactacactacggtactcttgttatagacggcgttactcctaatatgatcgattacttcggtaggccttacgaaggaatcgccgtcttcgacggtaagaagattaccgttaccggtactttgtggaacggcaacaaaattatcgacgagcggttaattaaccctgacggcagcctgttgtttagggttactattaacggagttaccggttggaggttgtgcgaaagaattctcgcttaa

SEQ ID NO: 435 - DNA, 621 bp, Artificial Sequence
  Modified Open Reading Frame
atggccgtctatccttacgacgtacccgattacgccgggtatccttacgacgtgcccgactacgccggtagttacccatacgacgttcccgactacgcaggtagcggcgtgtttactcttgaggacttcgtcggcgactggcggcagaccgcgggttataatctggaccaagtcctcgaacaaggcggagttagctctttatttcaaaatctcggcgtgagcgttacaccaatacagcgtatcgtacttagcggcgaaaacgggcttaagatcgacatccacgttattataccttacgaaggtctctccggcgaccaaatgggacagattgagaaaatctttaaagtcgtttaccctgtcgacgaccatcactttaaggttattctgcactacggtacactcgttatcgacggcgttactcctaatatgatcgactactttgggcgaccgtacgaaggtatcgcagtattcgacggtaagaaaattacagttaccggtacactctggaacggtaataaaattattgacgagcgacttattaacccggacggcagtctcttattcagggtcactattaacggcgttaccggttggcggttatgcgagcgcatccttgcataa

SEQ ID NO: 436 - DNA, 621 bp, Artificial Sequence
  Modified Open Reading Frame
atggctgtgtatccgtacgacgtgcccgactacgccgggtacccttatgacgttcccgactacgccggctcttacccatacgacgttcccgactacgccggtagcggtgtctttactttggaggacttcgtcggcgactggcggcaaaccgccggttataacttggatcaggtactcgaacaaggcggcgtttcatctttattccagaaccttggcgttagcgttactcctatccagcgtatcgtccttagcggcgagaacgggcttaaaatcgatattcacgttattataccgtatgaaggccttagtggcgaccaaatgggtcagatagagaaaatatttaaagtcgtctatcccgtcgacgatcatcactttaaggttatcttacattacggtacgttagtcattgacggcgtaactcctaatatgatcgactacttcggccgtccttacgagggtattgccgtgttcgatggtaagaaaattacggtgactggtactttgtggaacggtaataaaattattgacgaacgtcttattaacccggacgggtctttgttgttccgcgttactattaatggcgttacaggttggcgcctctgcgagcgcatcttggcgtaa

SEQ ID NO: 437 - DNA, 147 bp, Artificial Sequence
  Modified Open Reading Frame
atggggggctcaggtggctccggataccagccgtacagagtcgtcgtcctggggggctgcggcggcagcccctaccgggtcgtcgtgctttggttcggcggatccgggggctgcctgagcccccggtggtacttctactactggtaa

SEQ ID NO: 438 - DNA, 147 bp, Artificial Sequence; identical to SEQ ID NO: 11
  Modified Open Reading Frame

SEQ ID NO: 439 - DNA, 147 bp, Artificial Sequence
  Modified Open Reading Frame
atgggcggatccggcggcaccgggtaccagccctacagggtggtcgtgctcgggggcaggggggggagcccctacagggtcgtcgtgctgtcgttcggcggctctgggggctccctctgcccccggtggtacttctactactggtaa

SEQ ID NO: 440 - DNA, 795 bp, Artificial Sequence
  Modified Open Reading Frame
atggattataaagatgatgacgacaaagactataaggacgacgacgacaaggactacaaggacgacgacgacaagatggtgtcgaaaggcgaagagcttttcacgggtgtcgtccccatcctcgtcgagctggacggagatgttaacggacataagttctccgtctcgggcgagggggagggggacgccacctacgggaaactcactctaaaatttatttgcactactggcaaactccccgttccgtggccgacgctggtcacgacgctgacgtacggggtgcagtgcttttcccgatatcccgaccacatgaagcagcacgacttcttcaagtccgctatgcccgaaggatacgtgcaggagcggactatattctttaaggatgacgggaattataagacccgagctgaggttaagttcgagggtgacacccttgtcaaccggatcgaacttaaaggtatcgacttcaaagaggacggtaatatcttgggtcataagttggagtataattacaattcacacaatgtatacatcatggctgacaagcagaagaacggtataaaggtgaatttcaagattagacacaatatagaggacggctctgttcagttagccgatcattatcagcaaaacacccccatcggcgatgggccggtgttgttgcctgataatcattatttgtcaactcaatcagcgctgtccaaagatccaaatgagaagcgcgaccatatggtgttgctggagttcgtgacagcggccggcatcaccttaggtatggacgagctctacaaataa

SEQ ID NO: 441 - DNA, 795 bp, Artificial Sequence
  Modified Open Reading Frame
atggactacaaggatgacgatgacaaggactacaaggatgatgacgataaggactacaaggacgatgacgacaagatggtgtcgaagggggaggagctgttcaccggggtggtgcctatcctggtagaactggacggcgatgtgaacggacataagttctcggtgagtggcgaaggcgagggtgacgccacgtacgggaagcttaccctgaagtttatatgcaccacgggtaagcttcccgtaccgtggcccaccctcgtcactacgctgacttatggagtccagtgcttcagtcggtaccccgaccacatgaagcagcacgacttctttaagtcagcgatgcccgaggggtatgtccaggagcgtaccatcttctttaaagacgatggcaactacaagacgagggccgaggtgaagtttgaaggcgacaccttggtcaatcggattgagttaaaaggcatcgactttaaagaagatggtaatatcctgggccataaattggagtacaactataattcccataatgtgtatatcatggctgataaacagaaaaatgggattaaagtgaacttcaagattcgccacaacatcgaggacgggtccgttcagctcgccgaccactaccagcagaacacccccatcggggacggccccgtcctccttccagacaaccattatctgtcgacccagagtgccctgtcgaaggatccgaacgagaagcgggaccatatggtcctgctcgagttcgtgaccgcggcagggatcactctgggtatggacgagttgtataagtag

SEQ ID NO: 442 - DNA, 795 bp, Artificial Sequence
  Modified Open Reading Frame
atggactacaaggatgacgacgacaaggattacaaggacgacgacgacaaagactacaaggacgacgacgacaggatggtgtcgaagggggaggagctgttcaccggtgtggtgcctatcctggtagagctggacggcgacgtgaacggacacaagttctctgtgtctggcgagggcgagggggacgccacgtacgggaagcttaccctgaagttcatctgcaccacgggtaagcttcccgtcccctggcccaccttggtgaccaccctgacctacggggtgcagtgcttctcgcggtaccccgaccacatgaagcagcacgacttcttcaagtcggccatgcccgaggggtacgtccaggagcgtaccatcttctttaaagacgatggcaattacaagacgcgggccgaggtgaagttcgagggcgacaccttggtgaaccgcatcgagctgaagggcatcgactttaaagaagatggtaacatcctgggccacaagttggagtacaactacaactcccacaatgtgtacatcatggccgacaagcagaagaatggcatcaaggtgaacttcaagattcgccacaacatagaggacgggtccgttcagctcgccgaccactaccagcagaacacacccatcggggacggccccgtcctccttcccgacaaccattacctgtcgacgcagtccgcgttatccaaggaccccaacgagaagcgggaccacatggtcctgctagagttcgtcactgccgcgggtatcaccctcggcatggacgaactctacaagtag

SEQ ID NO: 443 - DNA, 795 bp, Artificial Sequence
  Modified Open Reading Frame
atggactataaagatgacgatgacgaggattgtaaagacgatggtgataaagatcacaaagatgatgatggtaaaatggtgagcaagggcgaggagctctttaccggcgtggtgccgattcttgtggaactggatggcgacgtgaacggccataagttcagcgtgagtggcgagggagagggcgacgcgacatatggcaaattgacgctaaagtttatttgcacgaccgggaaactcccggtcccgtggcccaccctcgtcaccacgctgacttatggcgtacaatgcttcagtcgctatccagatcacatgaaacagcatgacttcttcaagagcgccatgccggagggctatgtgcaagagcgtaccatcttctttaaagacgatggcaactacaagacgagggccgaggtgaagttcgaaggcgacaccttggtcaatcggattgagttaaagggcatcgactttaaagaagatggtaatattctaggccataaactagaatataactacaacagccacaatgtatacattatggcggataagcagaaaaatggtattaaagtgaactttaagatccgccataacattgaggacggcagcgtccagctcgccgatcattatcagcagaacacccccatcggcgatggcccggtgctgctgccggataaccattatctgagcacccagagcgcgctgagcaaagatccaaacgagaagcgggaccatatggtcctgctggagtttgttacagccgcgggaattaccttgggcatggatgaactttataagtaa

SEQ ID NO: 444 - DNA, 795 bp, Artificial Sequence
  Modified Open Reading Frame
atggactaccaggatgacgacgataaggactacaaggacgacggtgacaaggaccataaggacgacgacgacaagatggtgtccaagggcgaggagctgttcactggcgtggtgccgattctggtagaactggacggggacgtcaacgggcacaagttctctgtgtctggtgaaggcgagggcgacgcgacctatggtaagctgactctgaagttcatctgtacgaccggcaagctgcctgtcccctggcctacacttgtgacgacgttgacgtacggagttcagtgcttctcccggtacccggaccacatgaagcagcatgacttcttcaagtctgcgatgccggagggctacgtgcaggagcgcacaatcttctttaaggacgacggtaactacaagacccgtgctgaagtgaagtttgagggcgacacactagtcaaccggatcgagctgaagggcattgacttcaaggaggacgggaatatactgggacacaaactcgagtacaactacaattctcacaacgtgtatatcatggcggacaagcagaagaacggcataaaggtgaacttcaagattcggcataatatcgaagatgggtccgtgcagctcgccgatcactaccagcagaacacgccgatcggtgacggccccgtccttctgccggacaatcactatctctccacgcagtcagccctgtccaaggaccccaacgagaagcgtgaccatatggtcctcctggagttcgtgacagccgccggcatcacgctgggcatggacgagctgtacaagtaa

SEQ ID NO: 445 - DNA, 795 bp, Artificial Sequence; identical to SEQ ID NO: 440
  Modified Open Reading Frame

SEQ ID NO: 446 - DNA, 795 bp, Artificial Sequence; identical to SEQ ID NO: 441
  Modified Open Reading Frame

SEQ ID NO: 447 - DNA, 795 bp, Artificial Sequence; identical to SEQ ID NO: 442
  Modified Open Reading Frame

SEQ ID NO: 448 - DNA, 795 bp, Artificial Sequence; identical to SEQ ID NO: 443
  Modified Open Reading Frame

SEQ ID NO: 449 - DNA, 795 bp, Artificial Sequence; identical to SEQ ID NO: 444
  Modified Open Reading Frame

SEQ ID NO: 450 - DNA, 855 bp, Artificial Sequence
  Modified Open Reading Frame
atggtatcgaagggtgaggagctctttacaggcgtcgtgcctatcttggtggaactggacggcgacgtgaacggccacaagtttagcgtgtccggagagggcgaaggggatgccacgtacgggaagctgaccttgaagttcatctgtaccacgggcaagctgcccgtgccgtggccgaccctggtgaccacgctcacctatggggtccaatgcttcagtcggtaccccgaccacatgaagcagcacgatttcttcaagtccgccatgcccgaaggttacgtccaagaaaggacaatatttttcaaagacgatggcaactataaaacccgagccgaggtcaagttcgagggtgacaccctggtgaaccgcatcgagctcaagggcatcgacttcaaagaggatggtaatatcctgggccacaagctggagtataactacaacagccacaatgtgtacatcatggcggacaagcagaagaacggtatcaaggtgaactttaagattcggcacaatatcgaggacggcagcgtgcagctcgccgatcactaccaacagaacacgccgatcggcgatggccccgtgctgctgcccgataaccattatttgagcacccagagcgccctctccaaggaccctaacgagaagagggaccatatggtgctcctcgagttcgttaccgccgccggtatcaccctgggcatggacgaactgtataagagatctcgcgacataagccacggcttcccgccagccgtggccgcacaggacgacgggacgctgcccatgagctgcgctcaggagtccggcatggacagacatcccgccgcctgtgcgagcgcaaggatcaatgtgtaa

SEQ ID NO: 451 - DNA, 855 bp, Artificial Sequence
  Modified Open Reading Frame
atggtatcgaagggcgaggagctctttacaggcgtcgtgcctatcttggtggaactggacggcgacgtgaacggccacaagtttagcgtgtccggagagggcgaaggggatgccacgtacgggaagctgaccttgaagttcatctgtaccacgggcaagctgcccgtgccgtggccgaccctggtgaccacgctcacctatggggtccagtgcttcagtcggtaccccgaccacatgaagcagcacgatttcttcaagtccgccatgcccgaaggttacgtccaggaaaggaccatcttctttaaagacgatggcaactataaaacccgagccgaggtgaagttcgagggtgacaccctggtgaaccgcatcgagctcaagggcatcgactttaaagaggatggtaatatcctgggccacaagctggagtataactacaacagccacaatgtgtacatcatggcggacaagcagaagaacggtatcaaggtgaactttaagattcggcacaatatcgaggacggcagcgtgcagctcgccgatcactaccaacagaacacgccgatcggcgatggccccgtgctgctgcccgataaccattatttgagcacccagagcgccctctccaaggaccctaacgagaagagggaccatatggtgctcctcgagttcgttaccgccgccggtatcaccttgggcatggacgaactgtataagaggtctcgcgacattagccacggcttcccgccagccgtggccgcacaggacgacgggacgctgcccatgagctgcgctcaggagtccggcatggacagacatcccgccgcctgtgcgagcgcaaggatcaatgtgtaa

SEQ ID NO: 452 - DNA, 855 bp, Artificial Sequence
  Modified Open Reading Frame
atggtatcgaagggcgaggagctctttacaggcgtcgtgcctatcttggtggaactggacggcgacgtgaacggccacaagtttagcgtgtccggagagggcgaaggggatgccacgtacgggaagctgaccttgaagttcatctgtaccacgggcaagctgcccgtgccgtggccgaccctggtgaccacgctcacctatggggtccagtgcttcagtcggtaccccgaccacatgaagcagcacgatttcttcaagtccgccatgcccgaaggttacgtccaggaaaggaccatcttctttaaagacgatggcaactataagaccagagccgaggtgaagttcgagggtgacaccctggtgaaccgcatcgagctcaagggcatcgactttaaagaggatggtaatatcctgggccacaagctggagtataactacaacagccacaatgtgtacatcatggcggacaagcagaagaacggtatcaaggtgaactttaagattcggcacaatatcgaggacggcagcgtgcagctcgccgatcactaccaacagaacacgccgatcggcgatggccccgtgctgctgcccgataaccattatttgagcacccagagcgccctctccaaggaccctaacgagaagagggaccatatggtgctcctcgagttcgttaccgccgccggtatcaccttgggcatggacgaactgtataagaggtctcgcgacattagccacggcttcccgccagccgtggccgcacaggacgacgggacgctgcccatgagctgcgctcaggagtccggcatggacagacatcccgccgcctgtgcgagcgcaaggatcaatgtgtaa

SEQ ID NO: 453 - DNA, 855 bp, Artificial Sequence
  Modified Open Reading Frame
atggtatcgaagggcgaggagctctttacaggcgtcgtgcctatcttggtggaactggacggcgacgtgaacggccacaagtttagcgtgtccggagagggcgaaggggatgccacgtacgggaagctgaccttgaagttcatctgtaccacgggcaagctgcccgtgccgtggccgaccctggtgaccacgctcacctatggggtccagtgcttcagtcggtaccccgaccacatgaagcagcacgatttcttcaagtccgccatgcccgaaggttacgtccaggaaaggaccatcttctttaaagacgatggcaactataagacccgagccgaggtgaagttcgagggtgacaccctggtgaaccgcatcgagctcaagggcatcgactttaaagaggatggtaatatcctgggccacaagctggagtataactacaacagccacaatgtgtacatcatggcggacaagcagaagaacggtatcaaggtgaactttaagattcggcacaatatcgaggacggcagcgtgcagctcgccgatcactaccaacagaacacgccgatcggcgatggccccgtgctgctgcccgataaccattatttgagcacccagagcgccctctccaaggaccctaacgagaagagggaccatatggtgctcctcgagttcgttaccgccgccggtatcaccttgggcatggacgaactgtataagaggtctcgcgacattagccacggcttcccgccagccgtggccgcacaggacgacgggacgctgcccatgagctgcgctcaggagtccggcatggacagacatcccgccgcctgtgcgagcgcaaggatcaatgtgtaa

SEQ ID NO: 454 - DNA, 855 bp, Artificial Sequence
  Modified Open Reading Frame
atggtatcgaagggcgaggagctctttacaggcgtcgtgcctatcttggtggaactggacggcgacgtgaacggccacaagtttagcgtgtccggagagggcgaaggggatgccacgtacgggaagctgaccttgaagttcatctgtaccacgggcaagctgcccgtgccgtggccgaccctggtgaccacgctcacctatggggtccagtgcttcagtcggtaccccgaccacatgaagcagcacgatttcttcaagtccgccatgcccgaaggttacgtccaggaaaggaccatcttctttaaggacgatggcaactataagacccgagccgaggtgaagttcgagggtgacaccctggtgaaccgcatcgagctcaagggcatcgactttaaagaggatggtaatatcctgggccacaagctggagtataactacaacagccacaatgtgtacatcatggcggacaagcagaagaacggtatcaaggtgaactttaagattcggcacaatatcgaggacggcagcgtgcagctcgccgatcactaccaacagaacacgccgatcggcgatggccccgtgctgctgcccgataaccattatttgagcacccagagcgccctctccaaggaccctaacgagaagagggaccatatggtgctcctcgagttcgttaccgccgccggtatcaccttgggcatggacgaactgtataagaggtctcgcgacattagccacggcttcccgccagccgtggccgcacaggacgacgggacgctgcccatgagctgcgctcaggagtccggcatggacagacatcccgccgcctgtgcgagcgcaaggatcaatgtgtaa

SEQ ID NO: 455 - DNA, 855 bp, Artificial Sequence
  Modified Open Reading Frame
atggttagcaagggcgaggagctcttcaccggcgtcgtgccgatcctggtggagctggacggagacgtgaacggccacaagttcagcgtgagcggtgagggtgagggtgacgcgacctacggcaagctcaccctcaagttcatctgcaccaccggcaagctgccggtgccgtggccgaccctcgtgactaccctcacctacggcgtgcagtgcttcagccggtacccggaccacatgaagcagcacgacttcttcaagtctgcgatgccggagggctacgtgcaggagcgcaccatcttctttaaggatgatggcaattataagaccagggccgaggtcaagttcgaaggggatacccttgtgaacaggatcgagcttaaaggtattgatttcaaggaggacgggaacatcctcggtcataagctggagtataattacaacagccacaacgtctatattatggcggataagcagaagaatggcattaaggtcaacttcaagatccgccataatatagaggatgggagtgttcagctggcagatcactaccagcagaacactccgatcggggacggacccgtcctcttgcctgataaccattacctgagtactcagtctgctctatcgaaggaccccaacgagaagagggaccacatggtcctcctcgagttcgtcaccgcagcgggaataacgctggggatggacgaactctacaaacgttcccgtgacattagtcacgggttccctcccgctgtcgctgcacaagacgatgggacccttcccatgtcttgtgcacaagagagcgggatggaccggcatcctgccgcctgcgcctcggcgcggataaacgtttga

SEQ ID NO: 456 - DNA, 855 bp, Artificial Sequence
  Modified Open Reading Frame
atggtatcgaagggcgaggagctctttacaggcgtcgtgcctatcttggtggaactggacggcgacgtgaacggccacaagtttagcgtgtccggagagggcgaaggggatgccacgtacgggaagctgaccttgaagttcatctgtaccacgggcaagctgcccgtgccgtggccgaccctggtgaccacgctcacctatggggtccagtgcttcagtcggtaccccgaccacatgaagcagcacgatttcttcaagtccgccatgcccgaaggttacgtccaggaaaggaccatcttctttaaggacgatggcaactataagacccgagccgaggtgaagttcgagggtgacaccctggtgaaccgcatcgagctcaagggcatcgactttaaagaggatggtaatatcctgggccacaagctggagtataactacaacagccataatgtgtacatcatggcggacaagcagaagaacggtatcaaggtgaactttaagattcggcacaatatcgaggacggcagcgtgcagctcgccgatcactaccaacagaacacgccgatcggcgatggccccgtgctgctgcccgataaccattatttgagcacccagagcgccctctccaaggaccctaacgagaagagggaccatatggtgctcctcgagttcgttaccgccgccggtatcaccttgggcatggacgaactgtataagaggtctcgcgacattagccacggcttcccgccagccgtggccgcacaggacgacgggacgctgcccatgagctgcgctcaggagtccggcatggacagacatcccgccgcctgtgcgagcgcaaggatcaatgtgtaa

SEQ ID NO: 457 - DNA, 855 bp, Artificial Sequence
  Modified Open Reading Frame
atggtatcgaagggcgaggagctctttacaggcgtcgtgcctatcttggtggaactggacggcgacgtgaacggccacaagtttagcgtgtccggagagggcgaaggggatgccacgtacgggaagctgaccttgaagttcatctgtaccacgggcaagctgcccgtgccgtggccgaccctggtgaccacgctcacctatggggtccagtgcttcagtcggtaccccgaccacatgaagcagcacgatttcttcaagtccgccatgcccgagggttacgtccaggaaaggaccatcttctttaaggacgatggcaactataagacccgagccgaggtgaagttcgagggtgacaccctggtgaaccgcatcgagctcaagggcatcgactttaaagaggatggtaatatcctgggccacaagctggagtataactacaacagccataatgtgtacatcatggcggacaagcagaagaacggtatcaaggtgaactttaagattcggcacaatatcgaggacggcagcgtgcagctcgccgatcactaccaacagaacacgccgatcggcgatggccccgtgctgctgcccgataaccattatttgagcacccagagcgccctctccaaggaccctaacgagaagagggaccatatggtgctcctcgagttcgttaccgccgccggtatcaccttgggcatggacgaactgtataagaggtctcgcgacattagccacggcttcccgccagccgtggccgcacaggacgacgggacgctgcccatgagctgcgctcaggagtccggcatggacagacatcccgccgcctgtgcgagcgcaaggatcaatgtgtaa

SEQ ID NO: 458 - DNA, 855 bp, Artificial Sequence
  Modified Open Reading Frame
atggtatcgaagggcgaggagctctttacaggcgtcgtgcctatcttggtggaactggacggcgacgtgaacggccacaagtttagcgtgtccggagagggcgaaggggatgccacgtacgggaagctgaccttgaagttcatctgtaccacgggcaagctgcccgtgccgtggccgaccctggtgaccacgctcacctatggggtccagtgcttcagtcggtaccccgaccacatgaagcaacacgatttcttcaagtccgccatgcccgagggttacgtccaggaaaggaccatcttctttaaggacgatggcaactataagacccgagccgaggtgaagttcgagggtgacaccctggtgaaccgcatcgagctcaagggcatcgactttaaagaggatggtaatatcctgggccacaagctggagtataactacaacagccataatgtgtacatcatggcggacaagcagaagaacggtatcaaggtgaactttaagattcggcacaatatcgaggacggcagcgtgcagctcgccgatcactaccaacagaacacgccgatcggcgatggccccgtgctgctgcccgataaccattatttgagcacccagagcgccctctccaaggaccctaacgagaagagggaccatatggtgctcctcgagttcgttaccgccgccggtatcaccttgggcatggacgaactgtataagaggtctcgcgacattagccacggcttcccgccagccgtggccgcacaggacgacgggacgctgcccatgagctgcgctcaggagtccggcatggacagacatcccgccgcctgtgcgagcgcaaggatcaatgtgtaa

SEQ ID NO: 459 - DNA, 855 bp, Artificial Sequence
  Modified Open Reading Frame
atggtgtcaaagggtgaggaacttttcaccggtgtggtgcctattctggtggagctggacggcgacgtgaacggacacaagttctcggtgtctggtgagggcgagggcgacgccacgtacggcaagcttaccctgaagttcatctgcactacggggaagctgccggtgccctggcccaccctggtgaccacactgacctacggcgtgcagtgcttcagtcggtaccccgaccacatgaagcagcacgacttcttcaagtcggccatgcccgaggggtatgtccaggagcggaccatcttctttaaagacgatggcaattacaagacccgcgccgaggtgaagttcgagggcgacaccttggtgaaccggatcgagctaaaaggcatcgactttaaagaagatggcaacatcctgggccacaagttggagtataattataattcccacaatgtgtatatcatggccgacaagcagaagaatggcatcaaggtaaactttaagatcagacacaacatcgaggacgggtccgttcagctcgccgaccactaccagcagaatacgcccatcggtgacggcccggtgctgctgccggataaccactacttgtccacccagtctgcattgtccaaggaccctaacgagaagcgggaccatatggtcctgcttgaattcgttacggccgcgggcatcacactgggcatggacgagttgtataagaggtcacgcgatatttcgcatggctttccgccagcggtggcagcacaggatgatgggacacttcccatgtcctgtgctcaggagtccggcatggatcggcacccggccgcctgtgcgtcggctaggattaatgtataa

SEQ ID NO: 460 - DNA, 855 bp, Artificial Sequence
  Modified Open Reading Frame
atggtatcgaagggcgaggagctctttacaggcgtcgtgcctatcctggtggaactggacggcgacgtgaacggccacaagtttagcgtgtccggagagggcgaaggggatgccacgtacgggaagctgaccttgaagttcatctgtaccacgggcaagctgcccgtgccgtggccgaccctggtgaccacgctcacctatggggtccagtgcttcagtcggtaccccgaccacatgaagcaacacgatttcttcaagtccgccatgcccgagggttacgtccaggaaaggaccatcttctttaaggacgatggcaactataagacccgagccgaggtgaagttcgagggtgacaccctggtgaaccgcatcgagctcaagggcatcgactttaaagaggatggtaatatcctgggccacaagctggagtataactacaacagccataatgtgtacatcatggcggacaagcagaagaacggtatcaaggtgaactttaagattcggcacaatatcgaggacggcagcgtgcagctcgccgatcactaccaacagaacacgccgatcggcgatggccccgtgctgctgcccgataaccattatttgagcacccagagcgccctctccaaggaccctaacgagaagagggaccatatggtgctcctcgagttcgttaccgccgccggtatcaccttgggcatggacgaactgtataagaggtctcgcgacattagccacggcttcccgccagccgtggccgcacaggacgacgggacgctgcccatgagctgcgctcaggagtccggcatggacagacatcccgccgcctgtgcgagcgcaaggatcaatgtgtaa

SEQ ID NO: 461 - DNA, 855 bp, Artificial Sequence
  Modified Open Reading Frame
atggtatcgaagggcgaggagctctttacaggcgtcgtgcctatcctggtggaactggacggcgacgtgaacggccacaagtttagcgtgtccggagagggcgaaggggatgccacgtacgggaagctgaccttgaagttcatctgtaccacgggcaagctgcccgtgccgtggccgaccctggtgaccacgctcacctatggggtccagtgcttcagtcggtaccccgaccacatgaagcaacacgatttcttcaagtccgccatgcccgagggttacgtccaggaaaggaccatcttctttaaggacgatggcaactataagacccgagccgaggtgaagttcgagggtgacaccctggtgaaccgcatcgagctcaagggcatcgactttaaagaggatggtaatatcctgggccacaagctggagtataactacaacagccataatgtgtacatcatggcggacaagcagaagaacggtatcaaggtgaactttaagattcggcacaatatcgaggacggcagcgtgcagctcgccgatcactaccaacagaacacgccgatcggcgatggccccgtgctgctgcccgataaccattatttgagcacccagagcgccctctccaaggaccctaacgagaagagggaccatatggtgctcctcgagttcgttaccgccgccggtatcaccctgggcatggacgaactgtataagaggtctcgcgacattagccacggcttcccgccagccgtggccgcacaggacgacgggacgctgcccatgagctgcgctcaggagtccggcatggacagacatcccgccgcctgtgcgagcgcaaggatcaatgtgtaa

SEQ ID NO: 462 - DNA, 855 bp, Artificial Sequence
  Modified Open Reading Frame
atggtatcgaagggcgaggagctctttacaggcgtcgtgcctatcctggtggagctggacggcgacgtgaacggccacaagtttagcgtgtccggagagggcgaaggggatgccacgtacgggaagctgaccttgaagttcatctgtaccacgggcaagctgcccgtgccgtggccgaccctggtgaccacgctcacctatggggtccagtgcttcagtcggtaccccgaccacatgaagcaacacgatttcttcaagtccgccatgcccgagggttacgtccaggaaaggaccatcttctttaaggacgatggcaactataagacccgagccgaggtgaagttcgagggtgacaccctggtgaaccgcatcgagctcaagggcatcgactttaaagaggatggtaatatcctgggccacaagctggagtataactacaacagccataatgtgtacatcatggcggacaagcagaagaacggtatcaaggtgaactttaagattcggcacaatatcgaggacggcagcgtgcagctcgccgatcactaccaacagaacacgccgatcggcgatggccccgtgctgctgcccgataaccattatttgagcacccagagcgccctctccaaggaccctaacgagaagagggaccatatggtgctcctcgagttcgttaccgccgccggtatcaccctgggcatggacgaactgtataagaggtctcgcgacattagccacggcttcccgccagccgtggccgcacaggacgacgggacgctgcccatgagctgcgctcaggagtccggcatggacagacatcccgccgcctgtgcgagcgcaaggatcaatgtgtaa

SEQ ID NO: 463 - DNA, 855 bp, Artificial Sequence
  Modified Open Reading Frame
atggtatcaaagggcgaggagcttttcactggcgtcgtccccatcctcgtcgaacttgacggtgacgtcaatggacacaagttttctgtgtccggcgagggtgagggcgacgccacgtacggtaaacttactcttaagtttatctgtacgactggaaagctccccgtcccttggccaaccctcgtcactactttgacgtacggcgtacagtgcttcagtcggtatcccgaccatatgaagcagcacgacttttttaagtcggcgatgccggagggatatgtccaggagcggaccatctttttcaaagatgacgggaactataagacccgggccgaggttaagttcgagggcgacactctggtgaatcgcatcgaacttaagggcatcgactttaaggaggacgggaacatactggggcacaagctggagtacaactataactcgcataatgtctatatcatggctgataagcagaagaatggcatcaaggtcaacttcaagattagacataatatcgaggatggtagtgtccagctggccgaccattaccagcagaatactcctattggagatgggcccgttctcctgcccgacaatcattatctatcaacacagagtgccctttcgaaggatcccaacgagaagagggatcacatggtgttgttagagttcgtgacagcggccgggattacgctcggaatggatgagttatataagcgttcgcgcgatataagtcatggctttccgccggctgttgctgcacaggacgatggcactttgccaatgtcctgtgcgcaagagtccggcatggaccgtcacccggccgcatgcgcgagcgctagaattaatgtataa

SEQ ID NO: 464 - DNA, 855 bp, Artificial Sequence
  Modified Open Reading Frame
atggtatcgaagggcgaggagctctttacaggcgtcgtgcctatcctggtggagctggacggcgacgtgaacggccacaagtttagcgtgtccggagagggcgaaggggatgccacgtacgggaagctgaccttgaagttcatctgtaccacgggcaagctgcccgtgccgtggccgaccctggtgaccacgctcacctatggggtccagtgcttcagtcggtaccccgaccacatgaagcaacacgatttcttcaagtccgccatgcccgagggttacgtccaggaaaggaccatcttctttaaggacgatggcaactataagacccgagccgaggtgaagttcgagggtgacaccctggtgaaccgcatcgagctcaagggcatcgactttaaagaggatggtaatatcctgggccacaagctggagtataactacaacagccataatgtgtacatcatggcggacaagcagaagaacggtatcaaggtgaactttaagattcggcacaatatcgaggacggcagcgtgcagctcgccgatcactaccaacagaacacgccgatcggcgatggccccgtgctgctgcccgataaccattatttgagcacccagagcgccctctccaaggaccctaacgagaagagggaccatatggtgctcctcgagttcgttaccgccgccggcatcaccctgggcatggacgaactgtataagaggtctcgcgacattagccacggcttcccgccagccgtggccgcacaggacgacgggacgctgcccatgagctgcgctcaggagtccggcatggacagacatcccgccgcctgtgcgagcgcaaggatcaatgtgtaa

SEQ ID NO: 465 - DNA, 855 bp, Artificial Sequence
  Modified Open Reading Frame
atggtatcgaagggcgaggagctctttacaggcgtcgtgcctatcctggtggagctggacggcgacgtgaacggccacaagtttagcgtgtccggagagggcgaaggggatgccacgtacgggaagctgaccttgaagttcatctgtaccacgggcaagctgcccgtgccgtggccgaccctggtgaccacgctcacctatggggtccagtgcttcagtcggtaccccgaccacatgaagcaacacgatttcttcaagtccgccatgcccgagggttacgtccaggaaaggaccatcttctttaaggacgatggcaactataagacccgagccgaggtgaagttcgagggtgacaccctggtgaaccgcatcgagctcaagggcatcgactttaaagaggatggtaatatcctgggccacaagctggagtataactacaacagccataatgtgtacatcatggcggacaagcagaagaacggtattaaggtgaactttaagattcggcacaatatcgaggacggcagcgtgcagctcgccgatcactaccaacagaacacgccgatcggcgatggccccgtgctgctgcccgataaccattatttgagcacccagagcgccctctccaaggaccctaacgagaagagggaccatatggtgctcctcgagttcgttaccgccgccggcatcaccctgggcatggacgaactgtataagaggtctcgcgacattagccacggcttcccgccagccgtggccgcacaggacgacgggacgctgcccatgagctgcgctcaggagtccggcatggacagacatcccgccgcctgtgcgagcgcaaggatcaatgtgtaa

SEQ ID NO: 466 - DNA, 855 bp, Artificial Sequence
  Modified Open Reading Frame
atggtatcgaagggcgaggagctctttacaggcgtcgtgcctatcctggtggagctggacggcgacgtgaacggccacaagtttagcgtgtccggagagggcgaaggggatgccacgtacgggaagctgaccttgaagttcatctgtaccacgggcaagttgcccgtgccgtggccgaccctggtgaccacgctcacctatggggtccagtgcttcagtcggtaccccgaccacatgaagcaacacgatttcttcaagtccgccatgcccgagggttacgtccaggaaaggaccatcttctttaaggacgatggcaactataagacccgagccgaggtgaagttcgagggtgacaccctggtgaaccgcatcgagctcaagggcatcgactttaaagaggatggtaatatcctgggccacaagctggagtataactacaacagccataatgtgtacatcatggcggacaagcagaagaacggtattaaggtgaactttaagattcggcacaatatcgaggacggcagcgtgcagctcgccgatcactaccaacagaacacgccgatcggcgatggccccgtgctgctgcccgataaccattatttgagcacccagagcgccctctccaaggaccctaacgagaagagggaccatatggtgctcctcgagttcgttaccgccgccggcatcaccctgggcatggacgaactgtataagaggtctcgcgacattagccacggcttcccgccagccgtggccgcacaggacgacgggacgctgcccatgagctgcgctcaggagtccggcatggacagacatcccgccgcctgtgcgagcgcaaggatcaatgtgtaa

SEQ ID NO: 467 - DNA, 855 bp, Artificial Sequence
  Modified Open Reading Frame
atggtatcaaagggcgaggagcttttcactggcgtcgtccccatcctcgtcgaacttgacggtgacgtcaatggacacaagttttctgtgtccggcgagggtgagggcgacgccacgtacggtaaacttactcttaagtttatctgtacgactggaaagctccccgtcccttggccaaccctcgtcactactttgacgtatggcgtacagtgcttcagtcggtatcccgaccatatgaagcagcacgacttttttaagtcggcgatgccggagggatatgtccaggagcggaccatctttttcaaagatgacgggaactataagacacgggccgaggttaagttcgagggcgacactctggtgaatcgcatcgaacttaagggtatcgactttaaggaggacgggaacatactggggcacaagctggagtacaactataactcgcataatgtctatatcatggctgataagcagaagaatggcatcaaggtcaacttcaagattagacataatatcgaggatggtagtgtccagctggccgaccattaccagcagaatactccgattggagatgggcctgttctgttgcccgacaatcattatctatcaacacagagtgccctttcgaaggatcccaacgagaagagggatcacatggtgttgttagagttcgtgacagcggccgggattacgctcggaatggatgagttatataagcgttcgcgcgatataagtcatggctttccgccggctgttgctgcacaggacgatggcactttgccaatgtcctgtgcgcaagagtccggcatggaccggcacccggccgcatgcgcgagcgctagaattaatgtataa

SEQ ID NO: 468 - DNA, 855 bp, Artificial Sequence
  Modified Open Reading Frame
atggtatcgaagggcgaggagctctttacaggcgtcgtgcctatcctggtggagctggacggcgacgtgaacggccacaagtttagcgtgtccggagagggcgaaggggatgccacgtacgggaagctgaccttgaagttcatctgtaccacgggcaagttgcccgtgccgtggccgaccctggtgaccacgctcacctatggggtccagtgcttcagtcggtaccccgaccacatgaagcaacacgatttcttcaagtccgccatgcccgagggttacgtccaggaaaggaccatcttctttaaggacgatggcaactataagacccgagccgaggtgaagttcgagggtgacaccctggtgaaccgcatcgagctcaagggcatcgactttaaagaggatggtaatatcctgggccacaagctggagtataactacaacagccataatgtgtacatcatggcggacaagcagaagaacggtattaaggtgaactttaagatccggcacaatatcgaggacggcagcgtgcagctcgccgatcactaccaacagaacacgccgatcggcgatggccccgtgctgctgcccgataaccattatttgagcacccagagcgccctctccaaggaccctaacgagaagagggaccatatggtgctcctcgagttcgttaccgccgccggcatcaccctgggcatggacgaactgtataagaggtctcgcgacattagccacggcttcccgccagccgtggccgcacaggacgacgggacgctgcccatgagctgcgctcaggagtccggcatggacagacatcccgccgcctgtgcgagcgcaaggatcaatgtgtaa

SEQ ID NO: 469 - DNA, 855 bp, Artificial Sequence
  Modified Open Reading Frame
atggtgtccaagggcgaggagcttttcactggcgtcgtccccatcctcgtcgaacttgacggtgacgtcaatggacacaagttttctgtgtccggcgagggtgagggcgacgccacgtacggtaaacttactcttaagtttatctgtacgactggaaagctccccgtcccttggcccaccctcgtcactactttgacgtatggcgtacagtgcttcagtcggtatcccgaccatatgaagcagcacgacttttttaagtcggcgatgccggagggatatgtccaggagcggaccatctttttcaaagatgacgggaactataagacacgggccgaggttaagttcgagggcgacactctggtgaatcgcatcgaacttaagggtatcgactttaaggaggacgggaacatactggggcacaagctggagtacaactataactcgcataatgtctatatcatggctgataagcagaagaatggcatcaaggtcaacttcaagattagacataatatcgaggatggtagtgtccagctggccgaccattaccagcagaatactccgattggagatgggcctgttctgttgccggacaaccattatctatcaacacagagtgccctttcgaaggatcccaacgagaagagggatcacatggtgttgttagagttcgtgacagcggccgggattacgctcggaatggatgagttatataagcgttcgcgcgatataagtcatggctttccgccggctgttgctgcacaggacgatggcactttgccaatgtcctgtgcgcaagagtccggcatggaccggcacccggccgcatgcgcgagcgctagaattaatgtataa

SEQ ID NO: 470 - DNA, 855 bp, Artificial Sequence
  Modified Open Reading Frame
atggtgagcaaaggtgaggagctgtttacaggggtcgtcccaatcctagtggagctagacggcgacgtgaacgggcacaagttcagcgtcagcggcgagggggagggagatgccacgtacggcaaattgacgcttaagtttatttgcacgacgggcaaactccctgtcccctggccgactctcgtgacaacactcacatacggcgtccagtgcttcagtcgttatcctgatcacatgaagcagcatgacttcttcaagtctgccatgcctgaaggatacgtccaggaacggacgatattcttcaaggacgatgggaattataagactcgagctgaggtcaagttcgagggggatacgctggtaaaccgcatcgagctgaagggaattgacttcaaggaggatggcaacatcctcggccataagctcgagtacaattataattcccataacgtctacatcatggcagacaagcagaagaacgggattaaagtaaactttaagatcaggcataacattgaagatggtagcgtgcagctcgcggatcattaccagcagaacacgcccatcggtgatgggcctgttctgctgccagataaccattatctgagcacgcaaagtgctctcagtaaagatccgaacgagaagcgcgaccatatggtgctgttggagtttgtcacggccgctggcatcacactaggaatggacgagctctataaacggtcaagagacattagccacggcttcccaccagccgtggcggcgcaggacgatggcactttgccaatgtcctgcgcccaggaaagcggcatggatagacatcctgccgcgtgcgcctcggcgcgcattaatgtctga

SEQ ID NO: 471 - DNA, 855 bp, Artificial Sequence
  Modified Open Reading Frame
atggtatcgaagggcgaggagctctttacaggcgtcgtgcctatcctggtggagctggacggcgacgtgaacggccacaagtttagcgtgtccggagagggcgaaggggatgccacgtacgggaagctgaccttgaagttcatctgtaccacgggcaagttgcccgtgccgtggccgaccctggtgaccacgctcacctatggggtccagtgcttcagtcggtaccccgaccacatgaagcaacacgatttcttcaagtccgccatgcccgagggttacgtccaggaaaggaccatcttctttaaggacgatggcaattataagacccgagccgaagtgaagttcgagggtgacaccctggtgaaccgcatcgagctcaagggcatcgactttaaagaggatggtaatatcctgggccacaagctggagtataactacaacagccacaatgtgtacatcatggcggacaagcagaagaacggtattaaggtgaactttaagatccggcacaatatcgaggacggcagcgtgcagctcgccgatcactaccaacagaacacgccgatcggcgacggccccgtgctgctgcccgataaccattatttgagcacccagagcgccctctccaaggaccctaacgagaagagggaccatatggtgctcctcgagttcgttaccgccgccggcatcaccctgggcatggacgaactgtataagaggtctcgcgacattagccacggctttcctccagccgtggccgcacaggacgacgggacgctgcccatgagctgcgctcaggagtccggcatggacagacatcccgccgcctgtgcgagcgcaagaatcaatgtgtaa

SEQ ID NO: 472 - DNA, 855 bp, Artificial Sequence
  Modified Open Reading Frame
atggtatctaaaggagaggaactattcactggagtagttcctatccttgtggagttggacggcgacgtcaacggccataagttctccgtgtcgggtgagggcgaaggggacgccacttatggcaagttgacgttgaagtttatttgcacaacgggcaaattgcccgtaccctggccgacgctcgtgacgaccttaacttacggagttcagtgcttcagtaggtacccggaccacatgaagcaacatgatttctttaagtccgccatgcctgaagggtacgtccaggagcgcaccatcttctttaaggatgatggcaattataagaccagggccgaggtcaagttcgaaggggatacccttgtgaacaggatcgagcttaaaggtattgatttcaaggaggacgggaacatcctcggtcataagctggagtataattacaacagccacaacgtctatattatggcggataagcagaagaatggcattaaggtcaacttcaagatccgccataatatagaggatgggagtgttcagctggcagatcactaccagcagaacactccgatcggtgatggtccagtattgcttcctgataatcactacctgtcgacccagtcggccctgtctaaggacccgaatgaaaagcgggaccatatggtcctgcttgagttcgttaccgctgctggaattaccctgggcatggacgagttgtacaagaggtcgcgcgacatcagccatggcttccccccggctgttgctgcgcaggacgatgggactcttcccatgtcctgcgcgcaggagtcggggatggatcgccatccggctgcgtgtgcgtcggccaggattaatgtttaa

SEQ ID NO: 473 - DNA, 855 bp, Artificial Sequence
  Modified Open Reading Frame
atggtatcgaagggcgaggagctctttacaggcgtcgtgcctatcctggtggagctggacggcgacgtgaacggccacaagtttagcgtgtccggagagggcgaaggggatgccacgtacgggaagctgaccttgaagttcatctgtaccacgggcaagttgcccgtgccgtggccgaccctggtgaccacgctcacctatggggtccagtgcttcagtcggtaccccgaccacatgaagcaacacgatttcttcaagtccgccatgcccgagggctacgtccaggaaaggaccatcttctttaaggacgatggcaattataagacccgagccgaagtgaagttcgagggtgacaccctggtgaaccgcatcgagctcaagggcatcgactttaaagaggatggtaatatcctgggccacaagctggagtataactacaacagccacaatgtgtacatcatggcggacaagcagaagaacggtattaaggtgaactttaagatccggcacaatatcgaggacggcagcgtgcagctcgccgatcactaccaacagaacacgccgatcggcgacggccccgtgctgctgcccgataaccattatttgagcacccagagcgccctctccaaggaccctaacgagaagagggaccatatggtgctcctcgagttcgttaccgccgccggcatcaccctgggcatggacgaactgtataagaggtctcgcgacattagccacggctttcctccagccgtggccgcacaggacgacgggacgctgcccatgagctgcgctcaggagtccggcatggacagacatcccgccgcctgtgcgagcgcaagaatcaatgtgtaa

SEQ ID NO: 474 - DNA, 855 bp, Artificial Sequence
  Modified Open Reading Frame
atggtatcgaagggcgaggagctctttacaggcgtcgtgcctatcctggtggagctggacggcgacgtgaacggccacaagtttagcgtgtccggagagggcgaaggggatgccacgtacgggaagctgaccttgaagttcatctgtaccacgggcaagttgcccgtgccgtggccgaccctggtgaccacgctcacctatggggtccagtgcttcagtaggtaccccgaccacatgaagcaacacgatttcttcaagtccgccatgcccgagggctacgtccaggaaaggaccatcttctttaaggacgatggcaattataagacccgagccgaagtgaagttcgagggtgacaccctggtgaaccgcatcgagctcaagggcatcgactttaaagaggatggtaatatcctgggccacaagctggagtataactacaacagccacaatgtgtacatcatggcggacaagcagaagaacggtattaaggtgaactttaagatccggcacaatatcgaggacggcagcgtgcagctcgccgatcactaccaacagaacacgccgatcggcgacggccccgtgctgctgcccgataaccattatttgagcacccagagcgccctctccaaggaccctaacgagaagagggaccatatggtgctcctcgagttcgttaccgccgccggcatcaccctgggcatggacgaactgtataagaggtctcgcgacattagccacggctttcctccagccgtggccgcacaggacgacgggacgctgcccatgagctgcgctcaggagtccggcatggacagacatcccgccgcctgtgcgagcgcaagaatcaatgtgtaa

SEQ ID NO: 475 - DNA, 855 bp, Artificial Sequence
  Modified Open Reading Frame
atggtgagcaaaggtgaggagttgtttacaggggtcgtcccaatcctagtggagctagacggcgacgtgaacgggcacaagttcagcgtcagcggcgagggggagggagatgccacgtacggcaaattgacgcttaagtttatttgcacgacgggcaaactccctgtcccctggccgactctcgtgacaacactcacatacggcgtccagtgcttcagtcgttatcctgatcacatgaagcagcatgacttcttcaagtctgccatgcctgaaggatacgtccaggaacggacgatattcttcaaggacgatgggaattataagactcgagctgaggtcaagttcgagggggatacgctggtaaaccgcatcgagctgaagggaattgacttcaaggaggatggcaacatcctcggccataagctcgagtacaattataattcccataacgtctacatcatggcagacaagcagaagaacgggattaaagtaaactttaagatcaggcataacattgaagatggtagcgtgcagctcgcggatcattaccagcagaacacgcccatcggtgatgggcctgttctgctgccagataaccattatctgagcacgcaaagtgctctcagtaaagatccgaacgagaagcgcgaccatatggtgctgttggagtttgtcacggccgctggcatcacactaggaatggacgagctctataaacgatcaagagacattagccacggcttcccaccagccgtggcggcgcaggacgatggcactttgccaatgtcctgcgcccaggaaagcggcatggatagacatcctgccgcgtgcgcctcggcgcgcattaatgtctga

SEQ ID NO: 476 - DNA, 855 bp, Artificial Sequence
  Modified Open Reading Frame
atggtatctaaaggagaggaactattcactggagtagttcctatccttgtggagttggacggcgacgtgaacggccacaagttctccgtgtcgggtgagggcgaaggggacgccacctacggcaagttgacgttgaagtttatttgcacaacgggcaaattgccggtaccgtggccgaccttggtgacgaccttaacttacggagttcagtgcttcagtaggtacccggaccacatgaagcaacatgatttctttaagtccgccatgcctgaaggatacgtacaggagcgcaccatcttctttaaggatgatggcaattataagaccagggccgaggtcaagttcgaaggggatacccttgtgaacaggatcgagcttaaaggtattgatttcaaggaggacgggaacatcctcggtcataagctggagtataattacaacagccacaacgtctatattatggcggataagcagaagaatggcattaaggtcaacttcaagatccgccataatatagaggatgggagtgttcagctggcagatcactaccagcagaacactccgatcggtgatggtccagtattgcttcccgataatcactacctgtcgacccagtcggccctgtctaaggacccgaatgaaaagcgggaccatatggtcctgcttgagttcgttaccgctgctggcataaccctgggcatggacgagttgtacaagaggtcgcgcgacatcagccatggcttccccccggctgttgctgcgcaggacgatgggactcttcccatgtcctgcgcgcaggagtcggggatggatcgccatccggctgcgtgtgcgtcggccaggattaatgtttaa

SEQ ID NO: 477 - DNA, 855 bp, Artificial Sequence
  Modified Open Reading Frame
atggtgagcaaaggtgaggagttgtttacaggggtcgtcccaatcctagtggagctagacggcgacgtgaacgggcacaagttcagcgtcagcggcgagggggagggagatgccacgtacggcaaattgacgcttaagtttatttgcacgacgggcaaactccctgtcccctggccgactctcgtgacaacactcacatacggcgtccagtgcttcagtcgttatcctgatcacatgaagcagcatgacttcttcaagtctgccatgcctgaaggatacgtccaggaacggacgatattcttcaaggacgatgggaattataagactcgagctgaggtcaagttcgagggggatacgctggtaaaccgcatcgagctgaagggaattgacttcaaggaggatggcaacatcctcggccataagctcgagtacaattataattcccataacgtctacatcatggcagacaagcagaagaacgggattaaagtaaactttaagatcaggcataacattgaagatggtagcgtgcagctcgcggatcattaccagcagaacacgcccatcggtgatgggcctgttctgctgccagataaccattatctgagcacgcaaagtgctctcagtaaagatccgaacgagaagcgcgaccatatggtgctgttggagtttgtcacggccgctggcatcacactaggaatggacgagctctataaacgatccagagacattagccacggcttcccaccagccgtggcggcgcaggacgatggcactttgccaatgtcctgcgcccaggaaagcggcatggatagacatcctgccgcgtgcgcctcggcgcgcattaatgtctga

SEQ ID NO: 478 - DNA, 855 bp, Artificial Sequence
  Modified Open Reading Frame
atggtaagcaagggtgaagagctcttcaccggcgtcgtccccatcctcgtcgagttagacggagatgtgaatggtcacaagttctccgtctccggcgagggtgagggcgacgccacctacggcaagttaactcttaagtttatttgcacgacaggtaaacttccagtaccctggccgacactggtcaccacattaacgtatggtgtacaatgcttcagtcggtatcccgaccatatgaagcagcacgacttcttcaagtcggccatgcccgagggttatgtccaagaacgtaccatcttcttcaaggacgacggcaactataagacccgagctgaggtgaagttcgagggcgatacgctcgtgaaccgcatcgagctcaaaggtattgacttcaaggaggacgggaacatactggggcacaagctggagtataattacaacagccacaacgtttatatcatggctgacaaacagaagaatggtataaaagttaacttcaagataaggcacaacatcgaggacggctcggtacagttggcggaccactatcagcagaacaccccgatcggggatggtcccgtcctccttcctgataatcattacctgtcgacccagagcgctctctcgaaggatcccaacgagaaacgagaccatatggtcttgttagagttcgtcactgccgcagggattaccctgggcatggacgaactctataagcgctctcgggacatatcccacggcttccctcctgcggtcgccgctcaggacgacggcaccttacctatgagttgcgcgcaggagagcggcatggatcggcatcctgccgcgtgcgcctctgcacgtattaacgtgtag

SEQ ID NO: 479 - DNA, 855 bp, Artificial Sequence
  Modified Open Reading Frame
atggtaagtaagggtgaagagctcttcaccggcgtcgtccccatcctcgtcgagttagacggagatgtgaatggtcacaagttctccgtctccggcgagggtgagggcgacgccacctacggcaagttaactcttaagtttatttgcacgacaggtaaattaccagtaccctggccgacactggtcaccacacttacgtatggtgtccagtgcttcagtcggtatcccgaccatatgaagcagcacgacttcttcaagtcggccatgcccgagggttatgtccaagaacgtaccatcttcttcaaggacgacggcaactataagacccgagctgaggtgaagttcgagggcgatacgctcgtgaaccgcatcgagctcaaaggtattgacttcaaggaggacgggaacatactggggcacaagctggagtataattacaacagccacaacgtttatatcatggctgacaaacagaagaatggtataaaagttaacttcaagataaggcacaacatcgaggacggctcggtacagttggcggaccactatcagcagaacaccccgatcggggatggtcccgtcctccttcctgataatcattacctgtcgacccagagcgctctctcgaaggatcccaacgagaaacgcgaccatatggtcctgttagagttcgtcactgccgcagggattaccctgggcatggacgaactctataagcgctctcgggacatatcccacggcttccctcctgcggtcgccgctcaggacgacggcacgcttcctatgtcgtgcgcgcaggagagcggcatggatcggcatcctgccgcgtgcgcctctgcacgtattaacgtgtag

SEQ ID NO: 480 - DNA, 855 bp, Artificial Sequence
  Modified Open Reading Frame
atggtttcgaagggtgaggagttgtttactggagtggtccccatcctcgtcgaactcgacggggatgtgaacggtcacaagttctctgttagtggagaaggcgagggtgatgccacttatggcaaactcactctcaagtttatctgcactacggggaagctgccagtgccgtggccaaccttggtcacgactttgacctacggggtacagtgtttttcacggtatcctgatcacatgaagcagcatgacttcttcaagtctgctatgcctgaagggtatgttcaagagcggaccatcttctttaaagacgatggcaattacaagacccgtgccgaggtcaagtttgagggggatacgctggtgaatcgcatcgagcttaaaggcattgactttaaagaagatgggaacatactcgggcataagctggagtataattacaacagccataacgtgtatatcatggcggacaagcagaagaatgggatcaaagtcaacttcaagatccgtcataacattgaggatggcagtgtgcagctggcggaccactatcagcagaatactcctatcggggacgggcccgtgctgctgccggacaatcactacttgagcacacagagcgcgctatcgaaggatcccaatgagaagcgtgatcacatggtgttacttgaatttgtgacagccgctgggatcacgctgggtatggacgagctctacaagaggagccgcgatatctctcatgggtttcctcctgcggtagccgctcaggacgacggtaccttgccgatgtcgtgtgctcaagagagtggtatggatcggcacccggcagcatgcgccagtgcccgaataaacgtctag

SEQ ID NO: 481 - DNA, 855 bp, Artificial Sequence
  Modified Open Reading Frame
atggtgtcaaagggagaagagttgttcaccggcgtggtgccaatactggtagagctggatggggatgtgaacggacataagttctctgtgtccggtgagggtgagggtgatgccacctatggcaaactcaccctcaagttcatatgcaccaccggcaaactaccagtaccttggcccacgctggtaacaactctgacttatggcgtgcagtgcttttcacgttatccagatcacatgaaacagcacgatttctttaagtccgccatgcccgagggttacgtccaggaacgtaccatcttctttaaggacgacggaaattataagacgcgtgctgaggtcaagttcgagggtgataccctcgtgaaccgaatcgagctgaagggcatcgatttcaaagaagatggtaacatcctgggccacaaactcgagtataactacaacagccacaatgtgtacatcatggctgataagcagaagaacgggatcaaggtgaattttaaaattcgccataatatagaggacggcagcgtacagctcgccgaccactatcaacaaaacacccccattggggatggtcccgttcttctgccggacaatcattatttgtccacgcagtcagctttgtcgaaggaccccaacgaaaagcgtgatcacatggttttgctcgagtttgtgactgccgcaggcataaccctgggcatggacgagctttataagagatcgcgcgacataagccacggctttccaccagccgtggcagcgcaggacgacgggaccctgcccatgagctgcgctcaggagtccggcatggacaggcatcccgctgcctgcgctagtgcaagaataaatgtataa

SEQ ID NO: 482 - DNA, 855 bp, Artificial Sequence
  Modified Open Reading Frame
atggtgtcaaagggagaagagttgttcaccggcgtggtgccaatactggtagagctggatggggatgtgaacggacataagttctctgtgtccggtgagggtgagggtgatgccacctatggcaaactcaccctcaagttcatatgcaccaccggcaaactaccagtaccttggcccacgctggtaacaactcttacttatggcgtgcagtgcttttcacgttatccagatcacatgaaacagcacgatttctttaagtccgccatgcccgagggttacgtccaggaacgtaccatcttctttaaggacgacggaaattataagacgcgtgctgaggtcaagttcgagggtgataccctcgtgaaccgaatcgagctgaagggcatcgatttcaaagaagatggtaacatcctgggccacaaactcgagtataactacaacagccacaatgtgtacatcatggctgataagcagaagaacgggatcaaggtgaattttaaaattcgccataatatagaggacggcagcgtacagctcgccgaccactatcaacaaaacacccccattggggatggtcccgttcttctgccggacaatcattatttgtccacgcagtcagctttgtcgaaggaccccaacgaaaagcgtgatcacatggttttgctcgagtttgtgactgccgcaggcataaccctgggcatggacgagctttataagagatcgcgcgacataagccacggctttccaccagccgtggcagcgcaggacgacgggaccctgcccatgagctgcgctcaggagtccggcatggacaggcatcccgctgcctgcgctagtgcaagaataaatgtataa

SEQ ID NO: 483 - DNA, 855 bp, Artificial Sequence
  Modified Open Reading Frame
atggtatcgaagggcgaggagctctttacaggcgtcgtgcctatcctggtggagctggacggcgacgtgaacggccacaagtttagcgtgtccggagagggcgagggggatgccacgtatggcaagctgaccttgaagttcatctgtaccacgggcaaactgcccgtgccgtggccgaccctggtgacgaccctcacctacggggtccagtgcttcagtcggtaccccgaccacatgaagcaacacgacttcttcaagtccgccatgcccgagggctacgtccaggaaaggaccatcttctttaaggacgatggcaactacaagacccgagccgaagtgaagttcgagggtgacaccctcgtgaaccgcatcgagctcaagggcatcgactttaaagaggatggtaatatcctgggccacaagctggagtataactacaacagccacaatgtgtacatcatggcggacaagcagaagaacggtattaaggtgaactttaagatcagacataatatcgaggacggcagcgtgcagctcgccgatcactaccagcagaacacaccgatcggcgacggccccgtgctgctgcccgataaccattatctgagcacccagagcgccctctccaaggaccctaacgagaagagggaccatatggtgctcctcgagttcgttaccgccgccggcatcaccctgggcatggacgaactgtataagaggtctcgcgacattagccacggctttcctccagccgtggccgcacaggacgacgggacgctgcccatgagctgcgctcaggagtccggcatggacagacatcccgccgcctgtgcgagcgcaaggatcaatgtgtga

SEQ ID NO: 484 - DNA, 855 bp, Artificial Sequence
  Modified Open Reading Frame
atggtgtcaaagggtgaagagttgttcaccggcgtggtgccaatactggtagagctggatggggatgtgaacggacataagttctctgtgtccggtgagggtgagggtgatgccacctatggcaaactcaccctcaagttcatatgcaccaccggcaaactaccagtaccttggcccacgctggtaacaactcttacttatggcgtgcagtgcttttcacgttatccagatcacatgaaacagcacgatttctttaagtccgccatgcccgagggttacgtccaggaacgtaccatcttctttaaggacgacggaaattataagacgcgtgctgaggtcaagttcgagggtgataccctcgtgaaccgaatcgagctgaagggcatcgatttcaaagaagatggtaacatcctgggccacaaactcgagtataactacaacagccacaatgtgtacatcatggctgataagcagaagaacgggatcaaggtgaattttaaaattcgccataatatagaggacggcagcgtacagctcgccgaccactatcaacaaaacacccccattggggatggtcccgttcttctgccggacaatcattatttgtccacgcagtcagctttgtcgaaggaccccaacgaaaagcgtgatcacatggttttgctcgagtttgtgactgccgcaggcataaccctgggcatggacgagctttataagagatcgcgcgacataagccacggctttccaccagccgtggcagcgcaggacgacgggaccctgcccatgagctgcgctcaggagtccggcatggacaggcatcccgctgcctgcgctagtgcaagaataaatgtataa

SEQ ID NO: 485 - DNA, 855 bp, Artificial Sequence
  Modified Open Reading Frame
atggtatcaaagggagaggagctgttcacaggcgtcgtccccatattggtggagctggacggcgacgtgaacggacacaagttctctgtgtcgggggagggcgagggcgacgcgacgtacgggaagcttaccctgaagttcatctgcactacgggtaagcttcccgtgccctggcccactttggtaaccacactgacgtatggcgttcagtgcttctcgcggtatcccgatcacatgaagcagcatgacttcttcaaatcggcgatgcctgagggttatgtccaggagcgtaccatcttctttaaggacgatggcaattacaagacccgggccgaggtgaagttcgagggcgacaccttggtgaaccggatcgagttaaagggcatcgactttaaagaggatggtaatatcctgggccataagttggaatacaactataactctcacaatgtctacattatggcagacaagcagaagaatggtatcaaagtgaacttcaaaatccgacacaatattgaggacgggtccgttcagctcgccgatcattaccagcagaatacaccgattggggacggcccggtgctcctgccggacaatcattacctgtcgactcaatcggcactgtccaaggatcccaacgagaagcgtgatcacatggttctgttggagtttgtgacggccgccggcatcacactgggcatggacgagctgtacaaacgatcccgggacatcagccacggctttccgccggccgtggctgcccaggatgatgggacgttgccgatgagttgcgcacaggagtccggcatggacaggcacccggccgcctgtgccagcgcacggataaacgtgtaa

SEQ ID NO: 486 - DNA, 855 bp, Artificial Sequence
  Modified Open Reading Frame
atggtgtccaagggtgaagagttgttcaccggcgtggtgccaatactggtagagctggatggggatgtgaacggacataagttctctgtgtccggtgagggtgagggtgatgccacctatggcaaactcaccctcaagttcatatgcaccaccggcaaactaccagtaccttggcccacgctggtaacaactcttacttatggcgtgcagtgcttttcacgttatccagatcacatgaaacagcacgatttctttaagtccgccatgcccgagggttacgtccaggaacgtaccatcttctttaaggacgacggaaattataagacgcgtgctgaggtcaagttcgagggtgataccctcgtgaaccgaatcgagctgaagggcatcgatttcaaagaagatggtaacatcctgggccacaaactcgagtataactacaacagccacaatgtgtacatcatggctgataagcagaagaacgggatcaaggtgaattttaaaattcgccataatatagaggacggcagcgtacagctcgccgaccactatcaacaaaacacccccattggggatggtcccgttcttctgccggacaatcattatttgtccacgcagtcagctttgtcgaaggaccccaacgaaaagcgtgatcacatggttttgctcgagtttgtgactgccgcaggcataaccctgggcatggacgagctttataagagatcgcgcgacataagccacggctttccaccagccgtggcagcgcaggacgacgggaccctgcccatgagctgcgctcaggagtccggcatggacaggcatcccgctgcctgcgctagtgcaagaataaatgtataa

SEQ ID NO: 487 - DNA, 855 bp, Artificial Sequence
  Modified Open Reading Frame
atggtatcgaagggcgaggagctctttacaggcgtcgtgcctatcctggtggagctggacggcgacgtgaacggccacaagtttagcgtgtccggagagggcgagggggatgccacgtatggcaagctgaccttgaagttcatctgtaccacgggcaaactgcccgtgccgtggccgaccctggtgacgaccctcacctacggggtccagtgcttcagtaggtaccccgaccacatgaagcaacacgacttcttcaagtccgccatgcccgagggctacgtccaggaaagaaccatcttctttaaggacgatggaaactataagacccgagccgaggtgaagttcgagggtgacaccctggtgaaccgcatcgagctcaagggcatcgactttaaagaggatggtaatatcctgggccacaagctggagtacaactacaacagccacaatgtgtacatcatggcggacaagcagaagaacggtatcaaggtgaactttaagatcagacataatatcgaggacggcagcgtgcagctcgccgatcactaccagcagaacacgccgatcggcgacggccccgtgctgctgcccgataaccattatctgagcacccagagcgccctctccaaggaccctaacgagaagagggaccacatggtgctcctcgagttcgttaccgccgccggcatcaccctgggcatggacgagctgtacaagagatctcgggacattagccacggctttcctccagccgtggccgcacaggacgacgggacgctgcccatgagctgcgctcaggagtccggcatggacagacatcccgccgcctgtgcgagcgcaagaatcaatgtgtaa

SEQ ID NO: 488 - DNA, 855 bp, Artificial Sequence
  Modified Open Reading Frame
atggtgtccaagggagaagagttgttcaccggcgtggtgccaatactggtagagctggatggggatgtgaacggacataagttctctgtgtccggtgagggtgagggtgatgccacctatggcaaactcaccctcaagttcatatgcaccaccggcaaactaccagtaccttggcccacgctggtaacaactcttacttatggcgtgcagtgcttttcacgttatccagatcacatgaaacagcacgatttctttaagtccgccatgcccgagggttacgtccaggaacgtaccatcttctttaaggacgacggaaattataagacgcgtgctgaggtcaagttcgagggtgataccctcgtgaaccgaatcgagctgaagggcatcgatttcaaagaagatggtaacatcctgggccacaaactcgagtataactacaacagccacaatgtgtacatcatggctgataagcagaagaacgggatcaaggtgaattttaaaattcgccataatatagaggacggcagcgtacagctcgccgaccactatcaacaaaacacccccattggggatggtcccgttcttctgccggacaatcattatttgtccacgcagtcagctttgtcgaaggaccccaacgaaaagcgtgatcacatggttttgctcgagtttgtgactgccgcaggcataaccctgggcatggacgagctttataagagatcgcgcgacataagccacggctttccaccagccgtggcagcgcaggacgacgggaccctgcccatgagctgcgctcaggagtccggcatggacaggcatcccgctgcctgcgctagtgcaagaataaatgtataa

SEQ ID NO: 489 - DNA, 855 bp, Artificial Sequence
  Modified Open Reading Frame
atggtatcgaagggcgaggagctctttacaggcgtcgtgcctatcctggtggagctggacggcgacgtgaacggccacaagtttagcgtgtccggagagggcgagggggatgccacgtatggcaagctgaccttgaagttcatctgtaccacgggcaaactgcccgtgccgtggccgaccctggtgacgaccctcacctacggggtccagtgcttcagtaggtaccccgaccacatgaagcaacacgacttcttcaagtccgccatgcccgagggctacgtccaggaaagaaccatcttctttaaggacgatggaaactataagacccgagccgaggtgaagttcgagggtgacaccctggtgaaccgcatcgagctcaagggcatcgactttaaagaggatggtaatatcctgggccacaagctggagtacaactacaacagccacaatgtgtacatcatggcggacaagcagaagaacggtatcaaggtgaactttaagatcagacataatatcgaggacggcagcgtgcagctcgccgatcactaccagcagaacacgccgatcggcgacggccccgtgctgctgcccgataaccattatctgagcacccagagcgccctctccaaggaccctaacgagaagagggatcacatggtgctcctcgagttcgttaccgccgccggcatcaccctgggcatggacgagctgtacaagagatctcgggacattagccacggctttcctccagccgtggccgcacaggacgacgggacgctgcccatgagctgcgctcaggagtccggcatggacagacatcccgccgcctgtgcgagcgcaagaatcaatgtgtaa

SEQ ID NO: 490 - DNA, 855 bp, Artificial Sequence
  Modified Open Reading Frame
atggtctccaagggagaagagttgttcaccggcgtggtgccaatactggtagagctggatggggatgtgaacggacataagttctctgtgtccggtgagggtgagggtgatgccacctatggcaaactcaccctcaagttcatatgcaccaccggcaaactaccagtaccttggcccacgctggtaacaactcttacttatggcgtgcagtgcttttcacgttatccagatcacatgaaacagcacgatttctttaagtccgccatgcccgagggttacgtccaggaacgtaccatcttctttaaggacgacggaaattataagacgcgtgctgaggtcaagttcgagggtgataccctcgtgaaccgaatcgagctgaagggcatcgatttcaaagaagatggtaacatcctgggccacaaactcgagtataactacaacagccacaatgtgtacatcatggctgataagcagaagaacgggatcaaggtgaattttaaaattcgccataatatagaggacggcagcgtacagctcgccgaccactatcaacaaaacacccccattggggatggtcccgttcttctgccggacaatcattatttgtccacgcagtcagctttgtcgaaggaccccaacgaaaagcgtgatcacatggttttgctcgagtttgtgactgccgcaggcataaccctgggcatggacgagctttataagagatcgcgcgacataagccacggctttccaccagccgtggcagcgcaggacgacgggaccctgcccatgagctgcgctcaggagtccggcatggacaggcatcccgctgcctgcgctagtgcaagaataaatgtataa

SEQ ID NO: 491 - DNA, 855 bp, Artificial Sequence
  Modified Open Reading Frame
atggtatcgaagggcgaggagctctttacaggcgtcgtgcctatcctggtggagctggacggcgacgtgaacggccacaagtttagcgtgtccggagagggcgagggggatgccacgtatggcaagctgaccttgaagttcatctgtaccacgggcaaactgcccgtcccgtggccgaccctggtgacgaccctcacctacggggtccagtgcttcagtcggtaccccgaccacatgaagcaacacgacttcttcaagtccgccatgcccgagggctacgtccaggagagaaccatcttctttaaggacgatggaaactataagacccgagccgaggtgaagttcgagggtgacaccctggtgaaccgcatcgagctcaagggcatcgactttaaagaggatggtaatatcctgggccacaagctggagtacaactacaacagccacaatgtgtatatcatggcggacaagcagaagaacggtatcaaggtgaactttaagatcagacataatatcgaggacggcagcgtgcagctcgccgatcattaccagcagaacacgccgatcggcgacggccccgtgctgctgcccgataaccattatctgagcacccagagcgccctctccaaggaccctaacgagaagagggatcacatggtgctcctcgagttcgttaccgccgccggcatcaccctgggcatggacgagctgtacaagagatctcgcgacattagccacggctttcctccagccgtggccgcacaggacgacgggacgctgcccatgagctgcgctcaggagtccggcatggacaggcatcccgccgcctgtgcgagcgcaagaatcaatgtgtaa

SEQ ID NO: 492 - DNA, 855 bp, Artificial Sequence
  Modified Open Reading Frame
atggtatcgaagggcgaggagctctttacaggcgtcgtgcctatcctggtggagctggacggcgacgtgaacggccacaagtttagcgtgtccggagagggcgagggggatgccacgtatggcaagctgaccttgaagttcatctgtaccacgggcaaactgcccgtgccgtggccgaccctggtgacgaccctcacctacggggtccagtgcttcagtcggtaccccgaccacatgaagcaacacgacttcttcaagtccgccatgcccgagggctacgtccaggaaagaaccatcttctttaaggacgatggaaactataagacccgagccgaggtgaagttcgagggtgacaccctggtgaaccgcatcgagctcaagggcatcgactttaaagaggatggtaatatcctgggccacaagctggagtacaactacaacagccacaatgtgtacatcatggcggacaagcagaagaacggtatcaaggtgaactttaagatcagacataatatcgaggacggcagcgtgcagctcgccgatcactaccagcagaacacgccgatcggcgacggccccgtgctgctgcccgataaccattatctgagcacccagagcgccctctccaaggaccctaacgagaagagggatcacatggtgctcctcgagttcgttaccgccgccggcatcaccctgggcatggacgagctgtacaagagatctcgcgacattagccacggctttcctccagccgtggccgcacaggacgacgggacgctgcccatgagctgcgctcaggagtccggcatggacaggcatcccgccgcctgtgcgagcgcaagaatcaatgtgtaa

SEQ ID NO: 493 - DNA, 855 bp, Artificial Sequence
  Modified Open Reading Frame
atggtatcaaagggagaggaattattcacaggtgtcgttcccatattggttgagctggacggcgacgtgaacggacacaagttttctgtgtcgggggagggcgagggcgacgcgacgtacgggaagcttaccctgaagttcatctgcactacgggtaagcttcccgtgccctggcccactttggtaaccacactgacgtatggcgttcagtgcttctcgcggtatcctgatcacatgaagcagcatgacttcttcaaatcggcgatgcctgagggttatgtccaggagcgtactatcttctttaaggacgatggcaattacaagacccgggccgaggtgaagttcgagggcgacaccttggtgaaccggatcgagttaaagggcattgactttaaagaggatggtaatatcttgggccataagttggaatacaactataactctcacaatgtctacattatggcagacaagcagaagaatggtatcaaagtgaacttcaaaatccgacacaatattgaagacgggtctgttcagcttgctgatcattatcagcagaatacaccgattggggacggcccggtgctcctgccggacaatcattacttgtcgactcaatcggcactgtccaaggatcccaacgagaagcgtgatcacatggttctgttggagtttgtgacggccgccggcatcacactgggcatggacgagctgtacaaacgatcccgggacatcagccacggctttccgccggccgtggctgcccaggatgatgggacgttgccgatgagttgcgcacaggagtctggcatggacaggcacccggccgcctgtgccagcgcacggataaacgtgtaa

SEQ ID NO: 494 - DNA, 855 bp, Artificial Sequence
  Modified Open Reading Frame
atggtatcaaaaggggaggagctattcacgggagtagttccgatcctggtggagctggacggcgacgtgaacggacataagttcagcgtgtccggcgagggcgagggagatgccacctatggcaagctgaccttgaagttcatctgtacgaccggcaaactgccggtcccctggccgaccctcgtgaccacgctgacttacggagtccagtgcttcagtaggtaccccgaccacatgaagcagcacgacttctttaagtcagcgatgcccgagggttacgtccaggagaggaccatcttctttaaagacgatgggaattataagacccgagccgaggttaaattcgagggtgacaccctcgttaaccgaatcgagctcaagggcatcgactttaaagaggatggtaacatcctcggccataagctggagtacaactacaacagccacaatgtgtacattatggccgacaaacagaagaatggtatcaaggtgaactttaagattcgacacaacatcgaggacggcagcgtgcagcttgccgaccactatcagcagaacactcccatcggcgacggccccgtgctgctgccagacaaccattatctgagcactcagagtgccctgtccaaggaccctaacgaaaagagggatcacatggtgctcctcgagttcgttacggccgccggcatcaccctgggcatggacgagctctacaagcggtcccgagacatcagccacggctttccaccagccgtggctgcgcaggatgatgggacgcttccaatgagctgtgcccaggagtccggcatggacaggcacccagcagcatgtgccagcgccaggattaatgtataa

SEQ ID NO: 495 - DNA, 855 bp, Artificial Sequence
  Modified Open Reading Frame
atggtatcaaagggagaggaattgttcacaggtgtcgttcccatattggttgagctggacggcgacgtgaacggacacaagttttctgtgtcgggggagggcgagggcgacgcgacgtacgggaagcttaccctgaagttcatctgcactacgggtaagcttcccgtgccctggcccactttggtaaccacactgacgtatggcgttcagtgcttctcgcggtatcctgatcacatgaagcagcatgacttcttcaaatcggcgatgcctgagggttatgtccaggagcgtactatcttctttaaggacgatggcaattacaagacccgggccgaggtgaagttcgagggcgacaccttggtgaaccggatcgagttaaagggcattgactttaaagaggatggtaatatcttgggccataagttggaatacaactataactctcacaatgtctacattatggcagacaagcagaagaatggtatcaaagtgaacttcaaaatccgacacaatattgaagacgggtctgttcagcttgctgatcattatcagcagaatacaccgattggggacggcccggtgctcctgccggacaatcattacttgtcgactcaatcggcactgtccaaggatcccaacgagaagcgtgatcacatggttctgttggagtttgtgacggccgccggcatcacactgggcatggacgagctgtacaaacgatcccgggacatcagccacggctttccgccggccgtggctgcccaggatgatgggacgttgccgatgagttgcgcacaggagtctggcatggacaggcacccggccgcctgtgccagcgcacggataaacgtgtaa

SEQ ID NO: 496 - DNA, 855 bp, Artificial Sequence
  Modified Open Reading Frame
atggtatcaaagggagaggaactgttcacaggtgtcgttcccatattggttgagctggacggcgacgtgaacggacacaagttttctgtgtcgggggagggcgagggcgacgcgacgtacgggaagcttaccctgaagttcatctgcactacgggtaagcttcccgtgccctggcccactttggtaaccacactgacgtatggcgttcagtgcttctcgcggtatcctgatcacatgaagcagcatgacttcttcaaatcggcgatgcctgagggttatgtccaggagcgtactatcttctttaaggacgatggcaattacaagacccgggccgaggtgaagttcgagggcgacaccttggtgaaccggatcgagttaaagggcattgactttaaagaggatggtaatatcttgggccataagttggaatacaactataactctcacaatgtctacattatggcagacaagcagaagaatggtatcaaagtgaacttcaaaatccgacacaatattgaagacgggtctgttcagcttgctgatcattatcagcagaatacaccgattggggacggcccggtgctcctgccggacaatcattacttgtcgactcaatcggcactgtccaaggatcccaacgagaagcgtgatcacatggttctgttggagtttgtgacggccgccggcatcacactgggcatggacgagctgtacaaacgatcccgggacatcagccacggctttccgccggccgtggctgcccaggatgatgggacgttgccgatgagttgcgcacaggagtctggcatggacaggcacccggccgcctgtgccagcgcacggataaacgtgtaa

SEQ ID NO: 497 - DNA, 855 bp, Artificial Sequence
  Modified Open Reading Frame
atggtatcgaagggcgaggagctctttacaggcgtcgtgcctatcctggtggagctggacggcgacgtgaacggccacaagtttagcgtgtccggagagggcgaaggggatgccacgtatggcaagctgaccttgaagttcatctgtaccacgggcaaactgcccgtgccgtggccgaccctggtgaccaccctcacctacggggtccagtgcttcagtaggtaccccgaccacatgaagcagcacgacttcttcaagtccgccatgcccgagggctacgtccaggaaagaaccatcttctttaaggacgatggaaactataagacccgagccgaggtgaagttcgagggtgacaccctggtgaaccgcatcgagctcaagggcatcgactttaaagaggatggtaatatcctgggccacaagctggagtacaactacaacagccacaatgtgtacatcatggcggacaagcagaagaacggtatcaaggtgaactttaagatcagacataatatcgaggacggcagcgtgcagctcgccgatcactaccagcagaacacaccgatcggcgacggccccgtgctgctgcccgataaccattatctgagcacccagagcgccctctccaaggaccctaacgagaagagggatcacatggtgctcctcgagttcgttaccgccgccggcatcaccctgggcatggacgagctgtacaagagatctcgcgacattagccacggctttcctccagccgtggccgcacaggacgacgggacgctgcccatgagctgcgctcaggagtccggcatggacagacatcccgccgcctgtgcgagcgcaagaatcaatgtgtaa

SEQ ID NO: 498 - DNA, 855 bp, Artificial Sequence
  Modified Open Reading Frame
atggtatcaaagggagaggaactgtttacaggcgtggtccccatcctggtggagctcgacggggacgtcaatggacacaaattctctgtgtccggtgagggagaaggggacgctacctatggtaagctcaccctgaaattcatttgtactacggggaagctccccgtgccttggccgactcttgtcacgaccttaacttacggcgtgcaatgcttcagtcggtatcccgatcatatgaagcagcacgacttttttaagtcggccatgcctgaggggtacgtgcaagagcggaccatcttcttcaaagacgacggcaactataaaactagggccgaagtcaaatttgaaggagacacgttggtcaataggatagaactcaaagggatcgactttaaggaggatggtaatatcctaggtcacaaactggagtacaattataattcccataacgtatacatcatggctgataaacaaaaaaacggtattaaggtgaatttcaagattcgccataatatcgaagacggatcagtacagctggccgatcattatcagcagaatacgcctatcggggatggcccagttctgttaccggataaccattacctgtcgacccagagtgctctatccaaggaccctaacgaaaagcgtgaccatatggtcctgcttgagtttgtgaccgcagccggcataacactcggcatggatgagctttataaacgtagtcgtgatatttcacatggatttcccccggccgtggctgcacaggatgacgggaccctaccgatgtcctgcgcgcaggagagcgggatggatcgccatcccgctgcttgtgccagcgccaggataaacgtctga

SEQ ID NO: 499 - DNA, 855 bp, Artificial Sequence
  Modified Open Reading Frame
atggtatcgaagggcgaggagctctttacaggcgtcgtgcctatcctggtggagctggacggcgacgtgaacggccacaagtttagcgtgtccggagagggcgaaggggatgccacgtatggcaagctgaccttgaagttcatctgtaccacgggcaaactgcccgtgccgtggccgaccctggtgaccaccctcacctacggggtccagtgcttcagcaggtaccccgaccacatgaagcagcacgacttcttcaagtccgccatgcccgagggctacgtccaggaaagaaccatcttctttaaggacgatggaaactataagacccgagccgaggtgaagttcgagggtgacaccctggtgaaccgcatcgagctcaagggcatcgactttaaagaggatggtaatatcctgggccacaagctggagtacaactacaacagccacaatgtgtacatcatggcggacaagcagaagaacggtatcaaggtgaactttaagatcagacataatatcgaggacggcagcgtgcagctcgccgatcactaccagcagaacacaccgatcggcgacggccccgtgctgctgcccgataaccattatctgagcacccagagcgccctctccaaggaccctaacgagaagagggatcacatggtgctcctcgagttcgttaccgccgccggcatcaccctgggcatggacgagctgtacaagagatctcgcgacattagccacggctttcctccagccgtggccgcacaggacgacgggacgctgcccatgagctgcgctcaggagtccggcatggacagacatcccgccgcctgtgcgagcgcaagaatcaatgtgtaa

SEQ ID NO: 500 - DNA, 855 bp, Artificial Sequence
  Modified Open Reading Frame
atggtatcaaagggagaggaactgtttacaggcgtggtccccatcctggtggagctcgacggggacgtcaatggacacaaattctctgtgtccggtgagggagaaggggacgctacctatggtaagctcaccctgaaattcatttgtactacggggaagctccccgtgccttggccgactcttgtcacgaccttaacttacggcgtgcaatgcttcagtcggtatcccgatcatatgaagcagcacgacttttttaagtcggccatgcctgaggggtacgtacaagagcggaccatcttcttcaaagacgacggcaactataaaactagggccgaagtcaaatttgaaggagacacgttggtcaataggatagaactcaaagggatcgactttaaggaggatggtaatatcctaggtcacaaactggagtacaattataattcccataacgtatacatcatggctgataaacaaaaaaacggtattaaggtgaatttcaagattcgccataatatcgaagacggatcagtacagctggccgatcattatcagcagaatacgcctatcggggatggcccagttctgttaccggataaccattacctgtcgacccagagtgctctatccaaggaccctaacgaaaagcgtgaccatatggtcctgcttgagtttgtgaccgcagccggcataacactcggcatggatgagctttataaacgtagtcgtgatatttcacatggatttcccccggccgtagctgcccaggatgacgggaccctaccgatgtcctgcgcgcaggagagcgggatggatcgccatcccgctgcttgtgcaagcgctaggataaacgtctga

SEQ ID NO: 501 - DNA, 855 bp, Artificial Sequence
  Modified Open Reading Frame
atggtatcaaagggagaggaactgtttacaggcgtggtccccatcctggtggagctcgacggggacgtcaatggacacaaattctctgtgtccggtgagggagaaggggacgctacctatggtaagctcaccctgaaattcatttgtactacggggaagctccccgtgccttggccgactcttgtcacgaccttaacttacggcgtgcaatgcttcagtcggtatcccgatcatatgaagcagcacgacttttttaagtcggccatgcctgaggggtacgtacaagagcggaccatcttcttcaaagacgacggcaactataaaactagggccgaagtcaaatttgaaggagacacgttggtcaataggatagaactcaaagggatcgactttaaggaggatggtaatatcctaggtcacaaactggagtacaattataattcccataacgtatacatcatggctgataaacaaaaaaacggtattaaggtgaatttcaagattcgccataatatcgaagacggatcagtacagctggccgatcattatcagcagaatacgcctatcggggatggcccagttctgttaccggataaccattacctgtcgacccagagtgctctatccaaggaccctaacgaaaagcgtgaccatatggtcctgcttgagtttgtgaccgcagccggcataacactcggcatggatgagctttataaacgtagtcgtgatatttcacatggatttcccccggccgtagctgcccaggatgacgggaccctaccgatgtcctgcgcgcaggagagcgggatggatcgccatcccgctgcttgtgcaagcgctaggatcaacgtgtga

SEQ ID NO: 502 - DNA, 855 bp, Artificial Sequence
  Modified Open Reading Frame
atggtatcaaagggagaggaactgtttacaggcgtggtccccatcctggtggagctcgacggggacgtcaatggacacaaattctctgtgtccggtgagggagaaggggacgctacctatggtaagctcaccctgaaattcatttgtactacggggaagctccccgtgccttggccgactcttgtcacgaccttaacttacggcgtgcaatgcttcagtcggtatcccgatcatatgaagcagcacgacttttttaagtcggccatgcctgaggggtacgtacaagagcggaccatcttcttcaaagacgacggcaactataaaactagggccgaagtcaaatttgaaggagacacgttggtcaataggatagaactcaaagggatcgactttaaggaggatggtaatatcctaggtcacaaactggagtacaattataattcccataacgtatacatcatggctgataaacaaaaaaacggtattaaggtgaatttcaagattcgccataatatcgaagacggatcagtacagctggccgatcattatcagcagaatacgcctatcggggatggcccagttctgttaccggataaccattacctgtcgacccagagtgctctatccaaggaccctaacgaaaagcgtgaccatatggtcctgcttgagtttgtgaccgcagccggcataacactcggcatggatgagctttataaacgtagtcgtgatatttcacatggatttcccccggccgtagctgcccaggatgacgggaccctaccgatgtcctgcgcgcaggagagcgggatggatcgccatcccgctgcttgtgcaagcgctaggatcaacgtgtag

SEQ ID NO: 503 - DNA, 855 bp, Artificial Sequence
  Modified Open Reading Frame
atggtatcaaagggagaggaactgtttacaggcgtagtccccatcctggtggagctcgacggggacgtcaatggacacaaattctctgtgtccggtgagggagaaggggacgctacctatggtaagctcaccctgaaattcatttgtactacggggaagctccccgtgccttggccgactcttgtcacgaccttaacttacggcgtgcaatgcttcagtcggtatcccgatcatatgaagcagcacgacttttttaagtcggccatgcctgaggggtacgtacaagagcggaccatcttcttcaaagacgacggcaactataaaactagggccgaagtcaaatttgaaggagacacgttggtcaataggatagaactcaaagggatcgactttaaggaggatggtaatatcctaggtcacaaactggagtacaattataattcccataacgtatacatcatggctgataaacaaaaaaacggtattaaggtgaatttcaagattcgccataatatcgaagacggatcagtacagctggccgatcattatcagcagaatacgcctatcggggatggcccagttctgttaccggataaccattacctgtcgacccagagtgctctatccaaggaccctaacgaaaagcgtgaccatatggtcctgcttgagtttgtgaccgcagccggcataacactcggcatggatgagctttataaacgtagtcgtgatatttcacatggatttcccccggccgtagctgcccaggatgacgggacactaccgatgtcctgcgcgcaggagagcgggatggatcgccatcccgctgcttgtgcaagcgctaggatcaacgtgtag

SEQ ID NO: 504 - DNA, 855 bp, Artificial Sequence
  Modified Open Reading Frame
atggtatcaaaaggcgaggagctattcacgggagtagttccgatcctggtggagctggacggcgacgtgaacggacataagttcagcgtgtccggcgagggcgagggagatgccacctatggcaagctgaccttgaagttcatctgtacgaccggcaaactgccggtcccctggccgaccctcgtgaccacgctgacttacggagtccagtgcttcagtaggtaccccgaccacatgaagcagcacgacttctttaagtcagcgatgcccgagggctacgtccaggagaggaccatcttctttaaagacgatgggaattataagacccgagccgaggttaaattcgagggtgacaccctcgttaaccgcatcgagctcaagggcatcgactttaaagaggatggtaacatcctcggccataagctggagtacaactacaacagccacaatgtgtacattatggccgacaaacagaagaatggtatcaaggtgaactttaagattcgacacaacatcgaggacgggagcgtgcagctcgccgaccactatcagcagaatactcccatcggcgacggccccgtgctgctgccagacaaccattatctgagcactcagagtgccctgtccaaggaccctaacgaaaagagggatcacatggtgctcctcgagttcgttacggccgccggcatcaccctgggcatggacgagctctacaagcggtcccgagacatcagccacggctttcctccagccgtggctgcgcaggatgacgggacgcttccaatgagctgtgcccaggagtccggcatggacaggcacccagcagcatgtgccagcgccaggattaatgtataa

SEQ ID NO: 505 - DNA, 855 bp, Artificial Sequence
  Modified Open Reading Frame
atggtatcaaaaggagaagaactgttcacgggcgtggttccgatcctggtggagctggacggcgacgtgaacggccacaagttcagcgtgtccggggagggcgagggtgatgccacctacggcaagctgaccttgaagttcatctgcacgaccggcaaactgcccgtgccctggcccaccctcgtgaccactctgacctacggagtccagtgcttcagcaggtaccccgaccacatgaaacagcacgacttcttcaagtcggccatgccggaaggctatgtccaggagcggaccatcttcttcaaggacgacggtaactataagactagagccgaggttaagtttgaaggcgacaccctagtgaatcgaatcgaactcaaggggatcgacttcaaagaagatggcaacatcctgggccacaagctggagtacaactacaacagccacaatgtgtatattatggccgacaagcagaagaacgggataaaggtgaactttaagatcaggcacaacatagaggacggcagtgtgcaacttgccgaccactatcagcagaacacgcccatcggcgatgggcctgttctgctgccagataaccattatctgagcacccagagcgccctctccaaggaccctaacgagaagcgggaccacatggtgctgcttgagttcgttaccgccgccggcatcacgctaggcatggacgagctgtacaagaggtcccgcgatataagccacggctttcctccagccgtggccgcacaggacgacgggaccctgccaatgagctgcgcccaggagtccggcatggacaggcatcccgccgcctgtgcgagcgcgaggatcaacgtgtaa

SEQ ID NO: 506 - DNA, 855 bp, Artificial Sequence
  Modified Open Reading Frame
atggtttcaaagggcgaagagctgttcaccggcgtggtgccgatcctggtggagctggacggcgacgtgaacggccacaagttcagcgtgtccggggagggcgagggtgatgccacctacggcaagctgaccttgaagttcatctgcacgaccggcaaactgcccgtgccctggcccaccctcgtgaccactctgacctacggagtccagtgcttcagcaggtaccccgaccacatgaaacagcacgacttcttcaagtcggccatgccggaaggctatgtccaggagcggaccatcttcttcaaggacgacggtaactataagactagagccgaggttaagtttgaaggcgacaccctagtgaatcgaatcgaactcaaggggatcgacttcaaagaagatggcaacatcctgggccacaagctggagtacaactacaacagccacaatgtgtatattatggccgacaagcagaagaacgggataaaggtgaactttaagatcaggcacaacatagaggacggcagtgtgcaacttgccgaccactatcagcagaacacgcccatcggcgatgggcctgttctgctgccagataaccattatctgagcacccagagcgccctctccaaggaccctaacgagaagcgggaccacatggtgctgcttgagttcgttaccgccgccggcatcacgctgggtatggacgagctgtacaagaggtcccgcgatataagccacggctttcctccagccgtggccgcacaggacgacgggaccctgccaatgagctgcgcccaggagtccggcatggacaggcatcccgccgcctgtgcgagcgcgaggatcaacgtgtaa

SEQ ID NO: 507 - DNA, 855 bp, Artificial Sequence
  Modified Open Reading Frame
atggtatcaaagggagaggagctgttcacaggcgtcgtccccatattggtggagctggacggcgacgtgaacggacacaagttttctgtgtcgggggagggcgagggcgacgcgacgtacgggaagcttaccctgaagttcatctgcactacgggtaagcttcccgtgccctggcccactttggtaaccacactgacgtatggcgttcagtgcttctcgcggtatcccgatcacatgaagcagcatgacttcttcaaatcggcgatgcctgagggttatgtccaggagcgtaccatcttctttaaggacgatggcaattacaagacccgggccgaggtgaagttcgagggcgacaccttggtgaaccggatcgagttaaagggcatcgactttaaagaggatggtaatatcctgggccataagttggaatacaactataactctcacaatgtctacattatggcagacaagcagaagaatggtatcaaagtgaacttcaaaatccgacacaatattgaagacgggtccgttcagctcgccgatcattaccagcagaatacaccgattggggacggcccggtgctcctgccggacaatcattacctgtcgactcaatcggcactgtccaaggaccccaacgagaagcgtgatcacatggttctgttggagtttgtgacggccgccggcatcacactgggcatggacgagctgtacaaacggtcccgggacatcagccacggctttccaccggccgtggctgcccaggatgatgggacgttgccgatgagttgcgcacaggagtccggcatggacaggcacccggccgcctgtgccagcgcacggataaacgtgtaa

SEQ ID NO: 508 - DNA, 855 bp, Artificial Sequence
  Modified Open Reading Frame
atggtatcaaagggagaggaattatttacaggcgtcgtccccatattggtggagctggacggcgacgtgaacggacacaagttttctgtgtcgggggagggcgagggcgacgcgacgtacgggaagcttaccctgaagttcatctgcactacgggtaagcttcccgtgccctggcccactttggtaaccacactgacgtatggcgttcagtgcttctcgcggtatcccgatcacatgaagcagcatgacttcttcaaatcggcgatgcctgagggttatgtccaggagcgtaccatcttctttaaggacgatggcaattacaagacccgggccgaggtgaagttcgagggcgacaccttggtgaaccggatcgagttaaagggcatcgactttaaagaggatggtaatatcctgggccataagttggaatacaactataactctcacaatgtctacattatggcagacaagcagaagaatggtatcaaagtgaacttcaaaatccgacacaatattgaagacgggtccgttcagctcgccgatcattaccagcagaatacaccgattggggacggcccggtgctcctgccggacaatcattacctgtcgactcaatcggcactgtccaaggatcccaacgagaagcgtgatcacatggttctgttggagtttgtgacggccgccggcatcacactgggcatggacgagctgtacaaacgatcccgggacatcagccacggctttccgccggccgtggctgcccaggatgatgggacgttgccgatgagttgcgcacaggagtccggcatggacaggcacccggccgcctgcgctagcgcacggataaacgtgtga

SEQ ID NO: 509 - DNA, 855 bp, Artificial Sequence
  Modified Open Reading Frame
atggtatcaaagggagaggaattatttacaggcgtcgtccccatattggtggagctggacggcgacgtgaacggacacaagttttctgtgtcgggggagggcgagggcgacgcgacgtacgggaagcttaccctgaagttcatctgcactacgggtaagcttcccgtgccctggcccactttggtaaccacactgacgtatggcgttcagtgcttctcgcggtatcccgatcacatgaagcagcatgacttcttcaaatcggcgatgcctgagggttatgtccaggagcgtaccatcttctttaaggacgatggcaattacaagacccgggccgaggtgaagttcgagggcgacaccttggtgaaccggatcgagttaaagggcatcgactttaaagaggatggtaatatcctgggccataagttggaatacaactataactctcacaatgtctacattatggcagacaagcagaagaatggtatcaaagtgaacttcaaaatccgacacaatattgaagacgggtccgttcagctcgccgatcattaccagcagaatacaccgattggggacggcccggtgctcctgccggacaatcattacctgtcgactcaatcggcactgtccaaggatcccaacgagaagcgtgatcacatggttctgttggagtttgtgacggccgccggcatcacactgggcatggacgagctgtacaaacgatcccgggacatcagccacggctttccgccggccgtggctgcccaggatgatgggacgttgccgatgagttgcgcacaggagtccggcatggacaggcacccggccgcctgcgctagtgcacggataaacgtgtaa

SEQ ID NO: 510 - DNA, 855 bp, Artificial Sequence
  Modified Open Reading Frame
atggtatcaaagggagaggaattattcacaggcgtcgtccccatattggtggagctggacggcgacgtgaacggacacaagttttctgtgtcgggggagggcgagggcgacgcgacgtacgggaagcttaccctgaagttcatctgcactacgggtaagcttcccgtgccctggcccactttggtaaccacactgacgtatggcgttcagtgcttctcgcggtatcccgatcacatgaagcagcatgacttcttcaaatcggcgatgcctgagggttatgtccaggagcgtaccatcttctttaaggacgatggcaattacaagacccgggccgaggtgaagttcgagggcgacaccttggtgaaccggatcgagttaaagggcatcgactttaaagaggatggtaatatcctgggccataagttggaatacaactataactctcacaatgtctacattatggcagacaagcagaagaatggtatcaaagtgaacttcaaaatccgacacaatattgaagacgggtccgttcagctcgccgatcattaccagcagaatacaccgattggggacggcccggtgctcctgccggacaatcattacctgtcgactcaatcggcactgtccaaggatcccaacgagaagcgtgatcacatggttctgttggagtttgtgacggccgccggcatcacactgggcatggacgagctgtacaaacgatcccgggacatcagccacggctttccgccggccgtggctgcccaggatgatgggacgttgccgatgagttgcgcacaggagtccggcatggacaggcacccggccgcctgtgccagtgcacggataaacgtgtaa

SEQ ID NO: 511 - DNA, 855 bp, Artificial Sequence
  Modified Open Reading Frame
atggtatcaaagggagaggaattattcacaggcgtcgtccccatattggtggagctggacggcgacgtgaacggacacaagttttctgtgtcgggggagggcgagggcgacgcgacgtacgggaagcttaccctgaagttcatctgcactacgggtaagcttcccgtgccctggcccactttggtaaccacactgacgtatggcgttcagtgcttctcgcggtatcccgatcacatgaagcagcatgacttcttcaaatcggcgatgcctgagggttatgtccaggagcgtaccatcttctttaaggacgatggcaattacaagacccgggccgaggtgaagttcgagggcgacaccttggtgaaccggatcgagttaaagggcatcgactttaaagaggatggtaatatcctgggccataagttggaatacaactataactctcacaatgtctacattatggcagacaagcagaagaatggtatcaaagtgaacttcaaaatccgacacaatattgaagacgggtccgttcagctcgccgatcattaccagcagaatacaccgattggggacggcccggtgctcctgccggacaatcattacctgtcgactcaatcggcactgtccaaggatcccaacgagaagcgtgatcacatggttctgttggagtttgtgacggccgccggcatcacactgggcatggacgagctgtacaaacgatcccgggacatcagccacggctttccgccggccgtggctgcccaggatgatgggacgttgccgatgagttgcgcacaggagtccggcatggacaggcacccggccgcctgtgccagcgcacggataaacgtgtaa

SEQ ID NO: 512 - DNA, 855 bp, Artificial Sequence
  Modified Open Reading Frame
atggtatcaaagggagaggaattgttcacaggcgtcgtccccatattggtggagctggacggcgacgtgaacggacacaagttttctgtgtcgggggagggcgagggcgacgcgacgtacgggaagcttaccctgaagttcatctgcactacgggtaagcttcccgtgccctggcccactttggtaaccacactgacgtatggcgttcagtgcttctcgcggtatcccgatcacatgaagcagcatgacttcttcaaatcggcgatgcctgagggttatgtccaggagcgtaccatcttctttaaggacgatggcaattacaagacccgggccgaggtgaagttcgagggcgacaccttggtgaaccggatcgagttaaagggcatcgactttaaagaggatggtaatatcctgggccataagttggaatacaactataactctcacaatgtctacattatggcagacaagcagaagaatggtatcaaagtgaacttcaaaatccgacacaatattgaagacgggtccgttcagctcgccgatcattaccagcagaatacaccgattggggacggcccggtgctcctgccggacaatcattacctgtcgactcaatcggcactgtccaaggatcccaacgagaagcgtgatcacatggttctgttggagtttgtgacggccgccggcatcacactgggcatggacgagctgtacaaacgatcccgggacatcagccacggctttccgccggccgtggctgcccaggatgatgggacgttgccgatgagttgcgcacaggagtccggcatggacaggcacccggccgcctgtgccagcgcacggataaacgtgtaa

SEQ ID NO: 513 - DNA, 855 bp, Artificial Sequence
  Modified Open Reading Frame
atggtatcaaagggagaggaactgttcacaggcgtcgtccccatattggtggagctggacggcgacgtgaacggacacaagttttctgtgtcgggggagggcgagggcgacgcgacgtacgggaagcttaccctgaagttcatctgcactacgggtaagcttcccgtgccctggcccactttggtaaccacactgacgtatggcgttcagtgcttctcgcggtatcccgatcacatgaagcagcatgacttcttcaaatcggcgatgcctgagggttatgtccaggagcgtaccatcttctttaaggacgatggcaattacaagacccgggccgaggtgaagttcgagggcgacaccttggtgaaccggatcgagttaaagggcatcgactttaaagaggatggtaatatcctgggccataagttggaatacaactataactctcacaatgtctacattatggcagacaagcagaagaatggtatcaaagtgaacttcaaaatccgacacaatattgaagacgggtccgttcagctcgccgatcattaccagcagaatacaccgattggggacggcccggtgctcctgccggacaatcattacctgtcgactcaatcggcactgtccaaggatcccaacgagaagcgtgatcacatggttctgttggagtttgtgacggccgccggcatcacactgggcatggacgagctgtacaaacgatcccgggacatcagccacggctttccgccggccgtggctgcccaggatgatgggacgttgccgatgagttgcgcacaggagtccggcatggacaggcacccggccgcctgtgccagcgcacggataaacgtgtaa

SEQ ID NO: 514 - DNA, 855 bp, Artificial Sequence
  Modified Open Reading Frame
atggtatcaaagggagaggagctgttcacaggtgtcgttcccatattggttgagctggacggcgacgtgaacggacacaagttttctgtgtcgggggagggcgagggcgacgcgacgtacgggaagcttaccctgaagttcatctgcactacgggtaagcttcccgtgccctggcccactttggtaaccacactgacgtatggcgttcagtgcttctcgcggtatcctgatcacatgaagcagcatgacttcttcaaatcggcgatgcctgagggttatgtccaggagcgtactatcttctttaaggacgatggcaattacaagacccgggccgaggtgaagttcgagggcgacaccttggtgaaccggatcgagttaaagggcattgactttaaagaggatggtaatatcttgggccataagttggaatacaactataactctcacaatgtctacattatggcagacaagcagaagaatggtatcaaagtgaacttcaaaatccgacacaatattgaagacgggtctgttcagcttgctgatcattatcagcagaatacaccgattggggacggcccggtgctcctgccggacaatcattacttgtcgactcaatcggcactgtccaaggatcccaacgagaagcgtgatcacatggttctgttggagtttgtgacggccgccggcatcacactgggcatggacgagctgtacaaacgatcccgggacatcagccacggctttccgccggccgtggctgcccaggatgatgggacgttgccgatgagttgcgcacaggagtctggcatggacaggcacccggccgcctgtgccagcgcacggataaacgtgtaa

SEQ ID NO: 515 - DNA, 855 bp, Artificial Sequence
  Modified Open Reading Frame
atggtatcaaagggagaggagctgttcacaggcgtcgtccccatattggtggagctggacggcgacgtgaacggacacaagttttctgtgtcgggggagggcgagggcgacgcgacgtacgggaagcttaccctgaagttcatctgcactacgggtaagcttcccgtgccctggcccactttggtaaccacactgacgtatggcgttcagtgcttctcgcggtatcccgatcacatgaagcagcatgacttcttcaaatcggcgatgcctgagggttatgtccaggagcgtaccatcttctttaaggacgatggcaattacaagacccgggccgaggtgaagttcgagggcgacaccttggtgaaccggatcgagttaaagggcatcgactttaaagaggatggtaatatcctgggccataagttggaatacaactataactctcacaatgtctacattatggcagacaagcagaagaatggtatcaaagtgaacttcaaaatccgacacaatattgaagacgggtccgttcagctcgccgatcattaccagcagaatacaccgattggggacggcccggtgctcctgccggacaatcattacctgtcgactcaatcggcactgtccaaggatcccaacgagaagcgtgatcacatggttctgttggagtttgtgacggccgccggcatcacactgggcatggacgagctgtacaaacgatcccgggacatcagccacggctttccgccggccgtggctgcccaggatgatgggacgttgccgatgagttgcgcacaggagtccggcatggacaggcacccggccgcctgtgccagcgcacggataaacgtgtaa

SEQ ID NO: 516 - DNA, 855 bp, Artificial Sequence
  Modified Open Reading Frame
atggtgtcgaagggggaggagctgttcaccggcgtggtgcctatcctggtcgagctggacggcgacgtgaacggccacaagtttagcgtgtccggcgagggcgaaggcgacgccacctacgggaagctgaccctgaagttcatctgcaccaccggcaaactgcccgtgccctggcccaccctcgtgaccaccctgacctacggagtccagtgcttcagcagatatccagaccacatgaagcagcacgacttcttcaagtccgccatgcccgagggctacgtgcaggaaagaaccatcttctttaaggacgacggaaactacaagacccgagccgaggtgaagttcgagggagacaccctggtgaacagaatcgagctgaagggcatcgacttcaaagaggacggcaacatcctgggccacaaactggagtacaactacaacagccacaacgtgtacatcatggccgacaagcagaagaacgggatcaaggtgaactttaagatcagacacaacatcgaagacggcagcgtgcagctcgccgaccactaccagcagaacacaccgatcggcgacgggccggtgctgctgcccgacaaccactacctgagcacacagagcgccctgtccaaggacccaaacgagaagagagatcacatggtactgctcgagttcgtgacggccgcgggcatcaccctgggcatggacgagctgtacaagagatcccgcgacatcagccacggctttccgccggccgtggcggcgcaggacgacgggactctgcctatgagctgcgctcaggagtccggcatggacagacaccccgccgcctgtgccagcgccaggatcaacgtgtag

SEQ ID NO: 517 - DNA, 855 bp, Artificial Sequence
  Modified Open Reading Frame
atggtgtcgaagggggaggagctgttcaccggcgtggtgcctatcctggtcgagctggacggcgacgtgaacggccacaagtttagcgtgtccggcgagggcgaaggcgacgccacctacgggaagctgaccctgaagttcatctgcaccaccggcaaactgcccgtgccctggcccaccctcgtgaccaccctgacctacggagtccagtgcttcagcagatatccagaccacatgaagcagcacgacttcttcaagtccgccatgcccgagggctacgtgcaggaaagaaccatcttctttaaggacgacggaaactacaagacccgagccgaggtgaagttcgagggagacaccctggtgaacagaatcgagctgaagggcatcgacttcaaagaggacggcaacatcctgggccacaaactggagtacaactacaacagccacaacgtgtacatcatggccgacaagcagaagaacgggatcaaggtgaactttaagatcagacacaacatcgaagacggcagcgtgcagctcgccgaccactaccagcagaacacaccgatcggcgacgggccggtgctgctgcccgacaaccactacctgagcacacagagcgccctgtccaaggacccaaacgagaagagagatcacatggtactgctcgagttcgtgacggccgcgggcatcaccctgggcatggacgagctgtacaagagatcccgcgacatcagccacggctttccgccggccgtggcggcgcaggacgacgggactctgcctatgagctgcgcccaggagtccggcatggacagacaccccgccgcctgtgccagcgccaggatcaacgtgtag

SEQ ID NO: 518 - DNA, 855 bp, Artificial Sequence
  Modified Open Reading Frame
atggtgtccaaaggggaagagttgtttaccggcgtggtgccaatactggtagagctggatggggatgtgaacggacataagttctctgtgtccggtgagggtgagggtgatgccacctatggcaaactcaccctcaagttcatatgcaccaccggcaaactaccagtaccttggcccacgctggtaacaactcttacctatggcgtgcagtgcttttcacgttatccagatcacatgaaacagcacgatttctttaagtccgccatgcccgagggttacgtccaggaacgtaccatcttctttaaggacgacggaaattataagacgcgtgctgaggtcaaattcgagggtgataccctcgtgaaccgaatcgagctgaagggcatcgatttcaaagaagatggtaacatcctgggccacaaactcgagtataactataacagccataatgtgtacattatggctgataagcagaagaacgggatcaaggtgaattttaaaattcgccacaacatagaggacggcagcgtacagctcgccgaccactatcagcagaacacccccattggggatggtcccgttcttctgccggacaatcattatttgtccactcagtcagctttgtcgaaggaccccaacgaaaagcgtgaccatatggttttgctcgagtttgtgactgccgcaggcataaccctgggcatggacgagctttataagagatcgcgcgacatcagccacggctttccaccagccgtggcagcgcaagacgacgggaccctgcccatgagctgcgctcaggagtccggcatggacaggcatcccgctgcgtgcgctagtgcaagaataaatgtataa

SEQ ID NO: 519 - DNA, 855 bp, Artificial Sequence
  Modified Open Reading Frame
atggtgtcgaagggggaggagctgttcaccggcgtggtgcctatcctggtcgagctggacggcgacgtgaacggccacaagtttagcgtgtccggcgagggcgaaggcgacgccacctacgggaagctgaccctgaagttcatctgcaccaccggcaaactgcccgtgccctggcccaccctcgtgaccaccctgacctacggagtccagtgcttcagcagatatccagaccacatgaagcagcacgacttcttcaagtccgccatgcccgagggctacgtgcaggaaagaaccatcttctttaaggacgacggaaactacaagacccgagccgaggtgaagttcgagggagacaccctggtgaacagaatcgagctgaagggcatcgacttcaaagaggacggcaacatcctgggccacaaactggagtacaactacaacagccacaacgtgtacatcatggccgacaagcagaagaacgggatcaaggtgaactttaagatcagacacaacatcgaagacggcagcgtgcagctcgccgaccactaccagcagaacacaccgatcggcgacgggccggtgctgctgcccgacaaccactacctgagcacccagagcgccctgtccaaggacccaaacgagaagagagatcacatggtgctgctcgagttcgtgaccgccgcgggcatcaccctgggcatggacgagctgtacaagagatcccgcgacatcagccacggctttccgccggccgtggcggcgcaggacgacgggaccctgcccatgagctgcgcccaggagtccggcatggacagacaccccgccgcctgtgccagcgccaggatcaacgtgtag

SEQ ID NO: 520 - DNA, 855 bp, Artificial Sequence
  Modified Open Reading Frame
atggtgtcgaagggcgaggagctgtttaccggcgtggtgcccatcctggtggagctggacggcgacgtgaacgggcacaagtttagcgtgtccggcgagggtgagggtgatgccacctatggcaaactcaccctaaaatttatatgcaccaccgggaaactgcccgtgccctggcccactctcgtcacgacgctgacttacggagtccagtgcttcagcaggtaccccgaccatatgaagcagcatgacttctttaagtcagccatgcccgagggttacgtccaggagcggaccattttctttaaagacgacggcaattacaagacgagagccgaggtgaagttcgagggtgacacccttgtgaacagaatcgagctgaagggcatcgacttcaaagaggatggcaacatcctgggccacaaacttgagtataattataatagccataatgtgtacattatggcggacaagcagaagaacgggataaaggtgaacttcaaaatcaggcataatatcgaggacggcagcgtgcaactcgccgatcactatcaacaaaatacgccgatcggcgacgggcccgtattgctgcccgataatcattacctgagtacgcaaagtgccttgtccaaggacccaaatgaaaaaagagatcatatggtgctgctcgagtttgttaccgccgccggaatcaccctgggcatggatgagctgtacaaacgatcccgcgatatcagccacggcttcccgccagccgtggccgcgcaggacgacgggacgctgcccatgagctgtgctcaagagtccggcatggacagacatccggcggcctgtgccagcgcgaggataaatgtgtag

SEQ ID NO: 521 - DNA, 855 bp, Artificial Sequence
  Modified Open Reading Frame
atggtgtctaagggagaagagttgttcaccggcgtggtgccaatactggtagagctggatggggacgtgaacggacataagttcagcgtgtccggtgagggtgagggtgatgccacctatggcaaactcaccctcaagttcatctgcaccaccggcaaactaccagtaccttggcccacgctggtaacaactcttacctatggcgtgcagtgcttttcacgttatccagatcacatgaaacagcacgatttctttaagtccgccatgcccgagggttacgtccaggaacgtaccatcttctttaaggacgacggtaattataaaacgcgtgctgaggtcaaattcgagggtgataccctcgtgaaccgaatcgagctgaagggcatcgatttcaaagaagatggtaatatcctgggccacaaactcgagtataactataacagccacaatgtgtacatcatggctgataagcagaagaacgggatcaaagtaaactttaaaattcgccataatatagaggacggcagcgtacagctcgccgaccactatcagcagaatacacctattggcgacggtcccgttcttctgccggacaatcattatttgtccacccagtcagctttgtcgaaggaccccaacgaaaagcgtgatcatatggttttgctcgagtttgtgactgccgcaggcataaccctgggcatggacgagctttataagagatcgcgcgacataagccacggctttccaccagccgtggcagcgcaagacgacgggaccctgcccatgagctgcgctcaggagtccggcatggacaggcatcccgctgcgtgcgctagtgcaagaataaatgtatag

SEQ ID NO: 522 - DNA, 855 bp, Artificial Sequence
  Modified Open Reading Frame
atggtctccaagggcgaagagttgttcaccggcgtggtgccaatactggtagagctggatggggatgtgaacggacataagttctctgtgtccggtgagggtgagggtgatgccacctatggcaaactcaccctcaagttcatatgcaccaccggcaaactaccagtaccttggcccacgctggtaacaactcttacttatggcgtgcagtgcttttcacgttatccagatcacatgaaacagcacgatttctttaagtccgccatgcccgagggttacgtccaggaacgtaccatcttctttaaggacgacggaaattataagacgcgtgctgaggtcaagttcgagggtgataccctcgtgaaccgaatcgagctgaagggcatcgatttcaaagaagatggtaacatcctgggccacaaactcgagtataactacaacagccacaatgtgtacatcatggctgataagcagaagaacgggatcaaggtgaattttaaaattcgccataatatagaggacggcagcgtacagctcgccgaccactatcaacaaaacacccccattggggatggtcccgttcttctgccggacaatcattatttgtccacgcagtcagctttgtcgaaggaccccaacgaaaagcgtgatcacatggttttgctcgagtttgtgactgccgcaggcataaccctgggcatggacgagctttataagagatcgcgcgacataagccacggctttccaccagccgtggcagcgcaggacgacgggaccctgcccatgagctgcgctcaggagtccggcatggacaggcatcccgctgcctgcgctagtgcaagaataaatgtataa

SEQ ID NO: 523 - DNA, 855 bp, Artificial Sequence
  Modified Open Reading Frame
atggtttccaagggggaagagttgttcaccggcgtggtgccaatactggtagagctggatggggatgtgaacggacataagttctctgtgtccggtgagggtgagggtgatgccacctatggcaaactcaccctcaagttcatatgcaccaccggcaaactaccagtaccttggcccacgctggtaacaactcttacatatggcgtgcagtgcttttcacgttatccagatcacatgaaacagcacgatttctttaagtccgccatgcccgagggttacgtccaggaacgtaccatcttctttaaggacgacggaaattataagacgcgtgctgaggtcaagttcgagggtgataccctcgtgaaccgaatcgagctgaagggcatcgatttcaaagaagatggtaacatcctgggccacaaactcgagtataactacaacagccacaatgtgtacatcatggctgataagcagaagaacgggatcaaggtgaattttaaaattcgccataatatagaggacggcagcgtacagctcgccgaccactatcaacaaaacacccccattggggatggtcccgttcttctgccggacaatcattatttgtccacgcagtcagctttgtcgaaggaccccaacgaaaagcgtgatcacatggttttgctcgagtttgtgactgccgcaggcataaccctgggcatggacgagctttataagagatcgcgcgacataagccacggctttccaccagccgtggcagcgcaggacgacgggaccctgcccatgagctgcgctcaggagtccggcatggacaggcatcccgctgcctgcgctagtgcaagaataaatgtataa

SEQ ID NO: 524 - DNA, 855 bp, Artificial Sequence
  Modified Open Reading Frame
atggtgtccaagggcgaggagctctttaccggcgtggtgcctatcctggtggagctggacggcgacgtgaacggccacaagtttagtgtgtccggcgagggcgagggcgacgcgacctacggcaagctcacgctgaagttcatctgcaccacgggcaagctgcccgtgccctggcccacgctcgtgaccaccttgacctacggggtccagtgctttagtcgttaccccgaccacatgaagcagcacgatttcttcaagtctgccatgcccgagggctacgtccaggagagaaccatcttctttaaggacgacggtaactataagaccagggccgaggtgaagttcgagggagacaccctggtgaacagaatcgagctgaagggcatcgacttcaaggaggacggcaacatcctgggccacaagctggagtacaactacaacagccacaacgtgtacatcatggccgacaaacagaagaacggtatcaaggtgaactttaagatcaggcacaacatcgaagacggcagcgtgcagcttgccgaccactatcagcagaacacgcccatcggcgacggtcccgtgctgctgcccgacaaccattatctcagcacccagagcgccctctccaaggaccctaacgagaagagagatcacatggtgcttctcgagttcgtgaccgctgccggcatcaccctgggtatggacgagctgtataagagatcccgcgacatcagccacggctttcctcccgccgtggccgcccaagacgacgggaccctgcccatgagctgcgcccaggagtccggcatggacagacaccccgccgcctgtgccagcgccaggatcaacgtgtaa

SEQ ID NO: 525 - DNA, 855 bp, Artificial Sequence
  Modified Open Reading Frame
atggtgtccaagggcgaggagctctttaccggcgtggtgcctatcctggtggagctggacggcgacgtgaacggccacaagtttagtgtgtccggcgagggcgagggcgacgcgacctacggcaagctcacgctgaagttcatctgcaccacgggcaagctgcccgtgccctggcccacgctcgtgaccaccttgacctacggggtccagtgctttagtcgttaccccgaccacatgaagcagcacgatttcttcaagtctgccatgcccgagggctacgtccaggagagaaccatcttctttaaggacgacggtaactataagaccagggccgaggtgaagttcgagggagacaccctggtgaacagaatcgagctgaagggcatcgacttcaaggaggacggcaacatcctgggccacaagctggagtacaactacaacagccacaacgtgtacatcatggccgacaaacagaagaacggtatcaaggtgaactttaagatcaggcacaacatcgaagacggcagcgtgcagcttgccgaccactatcagcagaacacgcccatcggcgacggtcccgtgctgctgcccgacaaccattatctgagcacccagagcgccctctccaaggaccctaacgagaagagagatcacatggtgcttctcgagttcgtgaccgctgccggcatcaccctgggtatggacgagctgtataagagatcccgcgacatcagccacggctttcctcccgccgtggccgcccaagacgacgggaccctgcccatgagctgcgcccaggagtccggcatggacagacaccccgccgcctgtgccagcgccaggatcaacgtgtaa

SEQ ID NO: 526 - DNA, 855 bp, Artificial Sequence
  Modified Open Reading Frame
atggtctccaagggagaagagttgttcaccggcgtggtgccaatactggtagagctggatggggatgtgaacggacataagttctctgtgtccggtgagggtgagggtgatgccacctatggcaaactcaccctcaagttcatatgcaccaccggcaaactaccagtaccttggcccacgctggtaacaactcttacatatggcgtgcagtgcttttcacgttatccagatcacatgaaacagcacgatttctttaagtccgccatgcccgagggttacgtccaggaacgtaccatcttctttaaggacgacggaaattataagacgcgtgctgaggtcaagttcgagggtgataccctcgtgaaccgaatcgagctgaagggcatcgatttcaaagaagatggtaacatcctgggccacaaactcgagtataactacaacagccacaatgtgtacatcatggctgataagcagaagaacgggatcaaggtgaattttaaaattcgccataatatagaggacggcagcgtacagctcgccgaccactatcaacaaaacacccccattggggatggtcccgttcttctgccggacaatcattatttgtccacgcagtcagctttgtcgaaggaccccaacgaaaagcgtgatcacatggttttgctcgagtttgtgactgccgcaggcataaccctgggcatggacgagctttataagagatcgcgcgacataagccacggctttccaccagccgtggcagcgcaagacgacgggaccctgcccatgagctgcgctcaggagtccggcatggacaggcatcccgctgcgtgcgctagtgcaagaataaatgtataa

SEQ ID NO: 527 - DNA, 855 bp, Artificial Sequence
  Modified Open Reading Frame
atggtgtccaagggcgaggagctctttaccggcgtggtgcctatcctggtggagctggacggcgacgtgaacggccacaagtttagtgtgtccggcgagggcgagggcgacgcgacctacggcaagctcacgctgaagttcatctgcaccacgggcaagctgcccgtgccctggcccacgctcgtgaccaccttgacctacggggtccagtgctttagtcgttaccccgaccacatgaagcagcacgatttcttcaagtctgccatgcccgagggctacgtccaggagagaaccatcttctttaaggacgacggtaactataagaccagggccgaggtgaagttcgagggagacaccctggtgaacagaatcgagctgaagggcatcgacttcaaggaggacggcaacatcctgggccacaagctggagtacaactacaacagccacaacgtgtacatcatggccgacaaacagaagaacggtatcaaggtgaactttaagatcaggcacaacatcgaagacggcagcgtgcagcttgccgaccactatcagcagaacacacccatcggcgacggtcccgtgctgctgcccgacaaccattatctgagcacccagagcgccctctccaaggaccctaacgagaagagagatcacatggtgcttctcgagttcgtgaccgctgccggcatcaccctgggtatggacgagctgtataagagatcccgcgacatcagccacggctttcctcccgccgtggccgcccaagacgacgggaccctgcccatgagctgcgcccaggagtccggcatggacagacaccccgccgcctgtgccagcgccaggatcaacgtgtaa

SEQ ID NO: 528 - DNA, 855 bp, Artificial Sequence
  Modified Open Reading Frame
atggtgtccaagggcgaggagctctttaccggcgtggtgcctatcctggtggagctggacggcgacgtgaacggccacaagtttagtgtgtccggcgagggcgagggcgacgcgacctacggcaagctcacgctgaagttcatctgcaccacgggcaagctgcccgtgccctggcccacgctcgtgaccaccttgacctacggggtccagtgctttagtcgttaccccgaccacatgaagcagcacgatttcttcaagtctgccatgcccgagggctacgtccaggagagaaccatcttctttaaggacgacggtaactataagaccagggccgaggtgaagttcgagggagacaccctggtgaacagaatcgagctgaagggcatcgacttcaaggaggacggcaacatcctgggccacaagctggagtacaactacaacagccacaacgtgtacatcatggccgacaaacagaagaacgggatcaaggtgaactttaagatcaggcacaacatcgaagacggcagcgtgcagcttgccgaccactatcagcagaacacacccatcggcgacggtcccgtgctgctgcccgacaaccattatctgagcacccagagcgccctctccaaggaccctaacgagaagagagatcacatggtgcttctcgagttcgtgaccgctgccggcatcaccctgggtatggacgagctgtataagagatcccgcgacatcagccacggctttcctcccgccgtggccgcccaagacgacgggaccctgcccatgagctgcgcccaggagtccggcatggacagacaccccgccgcctgtgccagcgccaggatcaacgtgtaa

SEQ ID NO: 529 - DNA, 855 bp, Artificial Sequence
  Modified Open Reading Frame
atggtgagtaagggagaagagttgttcaccggcgtggtgccaatactggtagagctggatggggacgtgaacggacataagttcagcgtgtccggtgagggtgagggtgatgccacctatggcaaactcaccctcaagttcatctgcaccaccggcaaactaccagtaccttggcccacgctggtaacaactcttacctatggcgtgcagtgcttttcacgttatccagatcacatgaaacagcacgatttctttaagtccgccatgcccgagggttacgtccaggaacgtaccatcttctttaaggacgacggtaattataaaacgcgtgctgaggtcaaattcgagggtgataccctcgtgaaccgaatcgagctgaagggcatcgatttcaaagaagatggtaatatcctgggccacaaactcgagtataactataacagccacaatgtgtacatcatggctgataagcagaagaacgggatcaaagtaaactttaaaattcgccataatatagaggacggcagcgtacagctcgccgaccactatcagcagaatacacctattggcgacggtcccgttcttctgccggacaatcattatttgtccacccagtcagctttgtcgaaggaccccaacgaaaagcgtgatcatatggttttgctcgagtttgtgactgccgcaggcataaccctgggcatggacgagctttataagagatcgcgcgacataagccacggctttccaccagccgtggcagcgcaagacgacgggaccctgcccatgagctgcgctcaggagtccggcatggacaggcatcccgctgcgtgcgctagtgcaagaataaatgtatag

SEQ ID NO: 530 - DNA, 855 bp, Artificial Sequence
  Modified Open Reading Frame
atggtatccaagggcgaagagttgttcaccggcgtggtgccaatactggtagagctggatggggacgtgaacggacataagttcagcgtgtccggtgagggtgagggtgatgccacctatggcaaactcaccctcaagttcatctgcaccaccggtaaactgccagtgccttggcccacgctggtaacaactcttacatatggcgtgcagtgcttttcacgttatccagatcacatgaaacagcacgatttctttaagtccgccatgcccgagggttacgtccaggaaagaaccatcttctttaaggacgacggtaattataaaacgcgtgctgaggtcaaattcgagggtgataccctcgtgaaccgaatcgagctgaagggcatcgatttcaaagaagatggtaatatcctgggccacaaactcgagtataactataacagccacaatgtgtacatcatggctgataagcagaagaacgggatcaaagtgaactttaaaattcgccataatatagaggacggcagcgtgcagctcgccgaccactatcaacaaaacactcctattggcgacggtcccgttcttctgccggacaaccattacctgtccacccagagcgctttgtcgaaggaccccaacgaaaagcgtgatcatatggttttgctcgagtttgtgactgccgcaggcataaccctgggcatggacgagctttataagagatcgcgcgacataagccacggctttccgccagcggtagcagcgcaagacgacgggaccctgcccatgagctgcgctcaggagtccggcatggacaggcaccccgctgcctgcgcttccgcgcggatcaacgtgtag

SEQ ID NO: 531 - DNA, 855 bp, Artificial Sequence
  Modified Open Reading Frame
atggtgtcaaagggagaagagttgttcaccggcgtggtcccaatactggtagagctggacggggacgtgaacggacataagttcagcgtgtccggcgagggtgagggagatgccacctatggcaaactcaccctcaagtttatctgtaccacaggtaaactgccagtgccttggcccacgttggtgacaactcttacatatggcgtgcaatgcttttcaaggtatccagaccatatgaaacagcatgatttcttcaagtccgccatgcctgaagggtacgtccaggaaagaaccatcttctttaaggacgacggtaattataaaacgcgtgctgaggtcaaattcgagggtgataccctcgtgaaccgaatcgagctgaaaggcatcgacttcaaagaagatggtaatatcctgggccacaaactcgagtacaactacaacagtcacaatgtgtatattatggcggataagcagaaaaatggtattaaagtaaactttaaaatccgccataatatagaggacggcagcgtacagctagcagaccattatcaacagaatacacctattggtgatggtcctgtactgctgccggacaatcattatttgtccacgcaaagcgctttgtcgaaggatcccaacgaaaagcgtgatcatatggtactactcgagtttgtaactgccgcaggcattaccctaggcatggacgagctttacaagagatcgcgcgacataagccacggatttccgccagcggtagccgcgcaggacgacgggaccctgcccatgagctgtgctcaggagtccggcatggacaggcatcccgccgcctgcgcgtccgcgcggataaacgtgtag

SEQ ID NO: 532 - DNA, 855 bp, Artificial Sequence
  Modified Open Reading Frame
atggtgtcgaagggggaagagctgttcacgggcgtcgtgccgattctggtagaattggatggcgacgtgaacggacataagtttagcgtgtctggcgagggtgaaggcgatgccacctatggcaagctgaccttgaagttcatctgtactaccggcaagctgcctgtcccgtggccaaccctcgtgaccacgctgacttacggagtccagtgcttcagtaggtacccggaccacatgaagcagcacgacttctttaagtcagcgatgcccgaggggtacgtgcaggagaggaccatcttctttaaagacgatggcaactataagacccgagccgaggttaagttcgagggtgacaccctcgtcaaccgaatcgagctcaagggcatcgactttaaagaggatggtaacatcctgggccacaagctggagtacaactacaacagccacaacgtgtacatcatggcggacaagcagaagaacggtataaaggtgaactttaagatcagacacaatatcgaggacggcagcgtgcagctcgccgatcactaccagcagaacacgccgatcggcgacggccccgtgctgctgcccgataaccattatctgagcactcagagtgctctgtccaaggaccctaacgaaaagagggatcacatggtgctcctcgagttcgttaccgctgccgggatcaccctgggcatggacgagctctacaagaggtcccgcgacatcagccacggctttcctccagctgtggctgcgcaggacgacgggacccttcccatgagttgtgctcaggagtccggcatggacagacaccccgccgcctgcgccagcgccaggatcaacgtttaa

SEQ ID NO: 533 - DNA, 855 bp, Artificial Sequence
  Modified Open Reading Frame
atggtgtccaagggcgaggagctctttaccggcgtggtgcctatcctggtggagctggacggcgacgtgaacggccacaagtttagtgtgtccggcgagggcgagggcgacgcgacctacggcaagctcacgctgaagttcatctgcaccacgggcaagctgcccgtgccctggcccacgctcgtgaccaccttgacctacggggtccagtgctttagtcgttaccccgaccacatgaagcagcacgatttcttcaagtctgccatgcccgagggctacgtccaggagagaaccatcttctttaaggacgacggtaactataagaccagggccgaggtgaagttcgagggagacaccctggtgaacagaatcgagctgaagggcatcgacttcaaggaggacggcaacatcctgggccacaaactggagtacaactacaacagccacaacgtgtacatcatggccgacaaacagaagaacgggatcaaggtgaactttaagatcaggcacaacatcgaagacggcagcgtgcagcttgccgaccactatcagcagaacacacccatcggcgacggtcccgtgctgctgcccgacaaccattatctgagcacccagagcgccctctccaaggaccctaacgagaagagagatcacatggtgcttctcgagttcgtgaccgctgccggcatcaccctgggtatggacgagctgtataagagatcccgcgacatcagccacggctttcctcccgccgtggccgcccaagacgacgggaccctgcccatgagctgcgcccaggagtccggcatggacagacaccccgccgcctgtgccagcgccaggatcaacgtgtaa

SEQ ID NO: 534 - DNA, 855 bp, Artificial Sequence
  Modified Open Reading Frame
atggtatctaagggcgaggagctgttcaccggcgtggtcccaatactggtagagctggacggggacgtgaacggacataagttcagcgtgtccggcgagggtgagggcgatgccacctatggcaagctcaccctgaagtttatctgtaccacaggtaaactgccagtgccttggcccacgttggtgaccacccttacatatggcgtgcaatgcttttcaaggtatccagaccatatgaaacagcatgatttcttcaagtccgccatgcctgaagggtacgtccaggaaagaaccatcttctttaaggacgacggaaattataaaacgcgtgctgaggtcaaattcgagggtgataccctcgtgaaccgaatcgagctgaaaggcatcgacttcaaggaagatggtaatatcctgggccacaaactcgagtataattacaacagtcacaatgtgtatattatggccgataaacagaaaaatgggatcaaagtaaactttaagatccggcataatatcgaggacggcagcgtgcaactcgccgatcattatcaacaaaatacaccgatcggcgatggtcccgtgctgctgcccgataaccattatctgagtacccaatccgctttgtcgaaggatcccaatgagaagcgtgatcatatggtactactcgagtttgtaactgccgcaggcattaccctaggcatggacgagctttacaagagatcgcgcgacataagccacggatttccgccagcggtagccgcgcaggacgacgggaccctgcccatgagctgtgctcaggagtccggcatggacaggcatcccgccgcctgcgcgtccgcgcggataaacgtgtag

SEQ ID NO: 535 - DNA, 855 bp, Artificial Sequence
  Modified Open Reading Frame
atggtgtccaagggcgaggagctctttaccggcgtggtgcctatcctggtggagctggacggcgacgtgaacggccacaagtttagtgtgtccggcgagggcgagggcgacgcgacctacggcaagctcacgctgaagttcatctgcaccacgggcaagctgcccgtgccctggcccacgctcgtgaccaccttgacctacggggtccagtgctttagtcgttaccccgaccacatgaagcagcacgatttcttcaagtctgccatgcccgagggctacgtccaggagagaaccatcttctttaaggacgacggtaactataagaccagggccgaggtgaagttcgagggagacaccctggtgaacagaatcgagctgaagggcatcgacttcaaggaggacggcaacatcctgggccacaaactggagtacaactacaacagccacaacgtgtacatcatggccgacaaacagaagaacgggatcaaggtgaactttaagatcaggcacaacatcgaagacggcagcgtgcagcttgccgaccactatcagcagaacacacccatcggcgacggtcccgtgctgctgcccgacaaccattatctgagcacccagagcgccctctccaaggaccctaacgagaagagagatcacatggtgcttctcgagttcgtgaccgccgccggcatcaccctgggtatggacgagctgtataagagatcccgcgacatcagccacggctttcctcccgccgtggccgcccaagacgacgggaccctgcccatgagctgcgcccaggagtccggcatggacagacaccccgccgcctgtgccagcgccaggatcaacgtgtaa

SEQ ID NO: 536 - DNA, 855 bp, Artificial Sequence
  Modified Open Reading Frame
atggtctcaaagggagaggaactgttcaccggcgtagtccccatcctggtggagctcgacggggacgtcaatggacacaaattctctgtgtccggtgagggagaaggggacgctacctatggtaagctcaccctgaaattcatttgtactacggggaagctccccgtgccttggccgactcttgtcacgaccttaacttacggcgtgcaatgcttcagtcggtatcccgatcatatgaagcagcacgacttttttaagtcggccatgcctgaggggtacgtacaagagcggaccatcttcttcaaagacgacggcaactataaaactagggccgaagtcaaatttgaaggagacacgttggtcaataggatagaactcaaagggatcgactttaaggaggatggtaatatcctaggtcacaaactggagtacaattataattcccataacgtatacatcatggctgataaacaaaaaaacggtattaaggtgaatttcaagattcgccataatatcgaagacggatcagtacagctggccgatcattatcagcagaatacgcctatcggggatggcccagttctgttaccggataaccattacctgtcgacccagagtgctctatccaaggaccctaacgaaaagcgtgaccatatggtcctgcttgagtttgtgaccgcagccggcataacactcggcatggatgagctttataaacgtagtcgtgatatttcacatggatttcccccggccgtagctgcccaggatgacgggacactaccgatgtcctgcgcgcaggagagcgggatggatcgccatcccgctgcttgtgcaagcgctaggatcaacgtgtag

SEQ ID NO: 537 - DNA, 855 bp, Artificial Sequence
  Modified Open Reading Frame
atggtatcgaagggggaagagctgttcacgggcgtcgtgccgatcctggtggaattggacggcgacgtgaacggacataagtttagcgtgtcgggcgagggcgaaggcgatgccacctatggcaagctgaccttgaagttcatctgcactaccggcaagctgcctgtcccgtggcccaccctcgtgaccacgctgacttatggagtccaatgcttcagtaggtacccggaccacatgaagcagcatgacttctttaagtcagcgatgcccgaggggtacgtgcaggagaggaccatcttctttaaagacgatggcaactataagacccgagccgaggtgaagttcgagggtgacaccctcgtcaatcgcatcgagctcaagggcatcgactttaaagaggatggtaacatcctgggccacaagctggagtacaactacaacagccacaacgtgtacatcatggcggacaagcagaagaacggtatcaaggtgaactttaagatcaggcacaatatcgaggacggcagcgtgcagctcgccgatcactaccagcagaacacgccgatcggcgacggccccgtgctgctgcccgataaccattatctgagcactcagagcgccctgtccaaggaccctaacgaaaagagggaccacatggtgctcctcgagttcgttaccgctgccggcatcaccctgggcatggacgagctctacaagaggtcccgcgacatcagccacggctttcctccagccgtggctgcgcaggacgacgggacccttcccatgagctgtgcccaggagtccggcatggacaggcaccccgccgcctgtgccagcgcccgcatcaacgtgtaa

SEQ ID NO: 538 - DNA, 855 bp, Artificial Sequence
  Modified Open Reading Frame
atggtgagtaagggtgaggaactgttcaccggcgtggtcccaatactggtagagctggacggggacgtgaacggacataagttcagcgtgtccggcgagggtgagggcgatgccacctatggcaagctcaccctgaagtttatctgtaccacaggtaaactgccagtgccttggcccacgttggtgaccacccttacatatggcgtgcaatgcttttcaaggtatccagaccatatgaaacagcatgatttcttcaagtccgccatgcctgaagggtacgtccaggaaagaaccatcttctttaaggacgacggaaattataaaacgcgtgctgaggtcaaattcgagggtgataccctcgtgaaccgaatcgagctgaaaggcatcgacttcaaggaagatggtaatatcctgggccacaaactcgagtataattacaacagtcacaatgtgtatattatggccgataaacagaaaaatgggatcaaagtaaactttaagatccggcataatatcgaggacggcagcgtgcaactcgccgatcattatcaacaaaatacaccgatcggcgatggtcccgtgctgctgcccgataaccattatctgagtacccaatccgctttgtcgaaggatcccaatgagaagcgtgatcatatggtactactcgagtttgtaactgccgcaggcattaccctaggcatggacgagctttacaagagatcgcgcgacatatcccacggatttccgccagcggtagccgcgcaggacgacgggaccctgcccatgagctgtgctcaggagtccggcatggacaggcatcccgccgcctgcgcgtccgcgcggataaacgtgtaa

SEQ ID NO: 539 - DNA, 855 bp, Artificial Sequence
  Modified Open Reading Frame
atggtgtcgaagggggaagagctgttcacgggcgtcgtgccgattctggtggagttggatggcgatgtgaacggacataagtttagcgtgtctggcgagggtgaaggcgatgccacctatggcaagctgaccttgaagtttatctgtactactggcaagctgcctgtcccgtggccaaccctcgtgaccacgttgacttacggagtccagtgtttcagtaggtacccggaccacatgaagcagcacgatttctttaagtcagcgatgcccgaggggtacgtgcaggagaggaccatcttctttaaagacgatggcaactataagacccgagccgaggttaagttcgagggtgacactctcgtcaaccgaatcgagctcaagggcatcgactttaaggaggatggtaacatcctgggccacaagctggagtacaactacaacagccacaacgtgtacatcatggcggacaagcagaagaacggtataaaggtgaactttaagatcagacacaatatcgaggacggcagcgtgcagctcgccgatcactaccagcagaacacgccgattggtgacggccccgtgttgctgcccgataaccattatctgagcactcagagtgctctgtccaaggaccctaacgaaaagagggatcacatggtgctcctcgagttcgttaccgctgctgggatcaccctgggcatggacgagctctacaagaggtcccgcgacatcagccacggctttcctccagctgtggctgcgcaggacgacgggacccttcccatgagttgtgctcaggagtccggcatggacagacaccccgccgcctgcgccagcgccaggatcaacgtttaa

SEQ ID NO: 540 - DNA, 855 bp, Artificial Sequence
  Modified Open Reading Frame
atggtgtccaagggtgaggagctgttcaccggcgtggtgccaatactggtagagctggacggcgacgtgaacggacataagttcagcgtgtccggcgagggtgagggcgatgccacctatggcaagctcaccctcaagtttatctgtaccacaggtaaactgccagtgccttggcccacgttggtgaccaccctcacatatggcgtgcaatgcttttcaaggtatccagaccatatgaaacagcatgatttcttcaagtccgccatgcctgaagggtacgtccaggaaagaaccatcttctttaaggacgacggaaattataaaacgcgtgctgaggtcaaattcgagggtgataccctcgtgaaccgaatcgagctgaaaggcatcgacttcaaggaagatggtaatatcctgggccacaaactcgagtataattacaacagtcacaatgtgtatattatggccgataaacagaaaaatgggatcaaagtaaactttaagatccgacataatatcgaggacggcagcgtgcaactcgccgatcattatcaacaaaatacaccgatcggcgatggtcccgtgctgctgcccgataaccattatctgagtacccaatccgctttgtcgaaggatcccaatgagaagcgtgatcatatggtactactcgagtttgtgactgccgcaggcattaccctaggcatggacgagctttacaagagatcgcgcgacatatcccacggatttccgccagcggtagccgcgcaggacgacgggaccctgcccatgagctgtgctcaggagtccggcatggacaggcatcccgccgcctgcgcgtccgcgcggataaacgtgtaa

SEQ ID NO: 541 - DNA, 855 bp, Artificial Sequence
  Modified Open Reading Frame
atggtgtccaagggtgaggagctgttcaccggggtggtgccaatactggtagagctggacggcgacgtgaacggacataagttcagcgtgtccggcgagggtgagggcgatgccacctatggcaagctcaccctcaagtttatctgtaccacaggtaaactgccagtgccttggcccaccttggtgaccaccctcacatatggcgtgcaatgcttttcaagatatccagatcatatgaaacagcatgatttcttcaagtccgccatgcctgaagggtacgtccaggaaagaaccatcttctttaaggacgacggaaattataaaacgcgtgctgaggtcaaattcgagggtgataccctcgtgaaccgaatcgagctgaaaggcatcgacttcaaggaagatggtaatatcctgggccacaaactcgagtataattacaacagtcacaatgtgtatattatggccgataaacagaaaaatggaatcaaagtaaactttaagattcgacataatatcgaggacggcagcgtacaactcgccgatcattatcaacaaaatacaccgatcggcgatggtcctgtgctgctgcccgataaccattatctgagtacccaatccgctttgtcgaaggatcccaatgagaagcgtgatcatatggtactactcgagtttgtgactgccgcaggcattaccctaggcatggacgagctttacaagagatcgcgcgacatatcccacggatttcctccagcggtagccgcgcaggacgacgggaccctgcccatgagctgtgctcaggagtccggcatggacaggcatcccgccgcctgcgcgtccgcgaggataaacgtgtaa

SEQ ID NO: 542 - DNA, 855 bp, Artificial Sequence
  Modified Open Reading Frame
atggtgtctaaaggtgaggagctgttcaccggcgtggtgccaatactggtggagctggacggcgacgtgaacggccacaagttcagcgtgtccggcgagggtgagggcgatgccacctatggcaagctcaccctcaagtttatctgtaccacaggtaaactgccagtgccttggcccaccttggtgaccaccctcacctatggcgtgcagtgcttctcgaggtaccccgaccacatgaaacagcacgatttcttcaagtccgccatgcccgaggggtacgtccaggaaagaaccatcttctttaaggacgacggcaactataagacgcgtgccgaggtcaagttcgagggtgacaccctcgtgaaccgaatcgagctgaagggcatcgacttcaaggaagatggtaatatcctgggccacaaactggagtacaattacaacagccataatgtgtacattatggctgataaacagaagaatgggatcaaggtgaactttaagatcaggcacaatatcgaggacggcagcgtgcagctcgccgatcactaccagcagaacacaccgatcggcgacggtcccgtgctgctgcccgataaccattatctgagcacccagtccgccctatcgaaggaccctaatgagaagcgtgatcacatggtgctgctcgagttcgtgactgccgccggcattaccctgggcatggacgagctttacaagagatcgcgcgacatatcgcacggatttcctccagccgtagccgcgcaggacgacgggaccctgcccatgagctgcgctcaggagtccggcatggacaggcatcccgccgcctgcgcgagcgccaggataaacgtgtaa

SEQ ID NO: 543 - DNA, 855 bp, Artificial Sequence
  Modified Open Reading Frame
atggtctctaaaggtgaggagctgttcaccggcgtggtgcctatcctggtggagctggacggcgacgtgaacggccacaagttcagcgtgtccggcgagggcgagggcgacgccacctatggcaagctgaccctgaagttcatctgcaccaccggcaaactgcccgtgccctggcccaccctggtgaccaccctcacctatggagtccagtgcttctcgaggtaccccgaccacatgaagcagcacgacttctttaagtccgccatgcccgaggggtacgtccaggaaagaaccatcttcttcaaggacgacggcaattataagaccagagccgaggtgaagttcgagggtgacaccctcgtgaaccgaatcgagctgaagggcatagacttcaaggaggatggcaacatcctcggccacaaactggagtacaattataacagccataatgtgtacatcatggccgataaacagaagaatgggatcaaggtgaactttaagatcagacataatatcgaagacggcagcgtgcagctcgccgatcactaccagcagaacacaccgatcggcgacggacccgtgctgctgcccgataaccattatctgagcacccagtccgccctgtccaaggaccctaatgagaagagagatcacatggtgctgctcgagttcgtgaccgccgccggcatcaccctgggcatggacgagctttataagagatcccgcgacatcagccacggctttcctccagccgtggccgcgcaggacgacgggaccctgcccatgagctgcgctcaggagtccggcatggacaggcatcccgccgcctgcgcgagcgcgaggatcaacgtgtaa

SEQ ID NO: 544 - DNA, 855 bp, Artificial Sequence
  Modified Open Reading Frame
atggtgagcaagggcgaagagttgttcaccggcgtggtgccaatactggtagagctggatggggatgtgaacggacataagttctctgtgtccggtgagggtgagggtgatgccacctatggcaaactcaccctcaagttcatatgcaccaccggcaaactaccagtaccttggcccacgctggtaacaactcttacatatggcgtgcagtgcttttcacgttatccagatcacatgaaacagcacgatttctttaagtccgccatgcccgagggttacgtccaggaacgtaccatcttctttaaggacgacggaaattataagacgcgtgctgaggtcaagttcgagggtgataccctcgtgaaccgaatcgagctgaagggcatcgatttcaaagaagatggtaacatcctgggccacaaactcgagtataactacaacagccacaatgtgtacatcatggctgataagcagaagaacgggatcaaggtgaattttaaaattcgccataatatagaggacggcagcgtacagctcgccgaccactatcaacaaaacacccccattggggatggtcccgttcttctgccggacaatcattatttgtccacgcagtcagctttgtcgaaggaccccaacgaaaagcgtgatcacatggttttgctcgagtttgtgactgccgcaggcataaccctgggcatggacgagctttataagagatcgcgcgacataagccacggctttccaccagccgtggcagcgcaggacgacgggaccctgcccatgagctgcgctcaggagtccggcatggacaggcatcccgctgcctgcgctagtgcaagaataaatgtataa

SEQ ID NO: 545 - DNA, 855 bp, Artificial Sequence
  Modified Open Reading Frame
atggtgtccaagggcgaggagctgttcaccggcgtggtgcctatcctggtggagctggacggcgacgtgaacggccacaagtttagcgtgtccggagagggcgaaggggacgccacctatggcaagctgaccctgaagttcatctgcaccaccggcaaactgcccgtgccctggcccacgctcgtgaccaccctgacctacggagtccagtgcttcagcagatacccggaccacatgaagcagcacgacttcttcaagtccgccatgcccgagggctacgtgcaggaaagaaccatcttctttaaggacgacgggaactataagaccagagccgaggtgaagttcgagggagacaccctggtgaacagaatcgagctgaagggcatcgacttcaaagaggacggcaacatcctgggccacaaactggagtacaactacaacagccacaacgtgtacatcatggccgataaacagaagaacgggattaaggtgaactttaagatcagacacaatatcgaggacggcagcgtgcagctcgccgaccactaccagcagaacacacccatcggcgacggccccgtgctgctgcccgataaccattacctgagcacccagagcgccctctccaaggaccctaacgagaagagagatcacatggtgctgctcgagttcgtgaccgccgccggcatcaccctgggcatggacgagctgtacaagagatcccgcgacatcagccacggctttcctcccgccgtggccgcccaagacgacgggaccctgcccatgagctgcgcccaggagtccggcatggacagacaccctgccgcctgtgccagcgccaggatcaacgtgtaa

SEQ ID NO: 546 - DNA, 855 bp, Artificial Sequence
  Modified Open Reading Frame
atggtatctaagggggaagagctttttaccggcgtagttccaatcctcgtcgagctcgacggagacgtaaacggtcataagtttagtgtctccggcgagggcgagggtgacgcaacatatggaaagctaacgcttaaattcatatgtacgaccggcaagttgccagtaccctggccaacgctggtcacaactttaacatacggagtccagtgtttctcgcgatatcccgaccacatgaaacagcatgatttttttaagtcagccatgcctgaaggttatgtgcaggaacgtacaatattcttcaaagatgacggtaactataaaactagggcagaagtcaagtttgagggtgacaccctagttaaccgcatcgaattgaagggtattgacttcaaggaggatggaaacatcctaggccataaattagaatataattacaactcacataatgtttatatcatggctgataaacaaaagaatgggataaaagtaaactttaaaattcgccacaatatcgaggacgggtccgtccaacttgcggaccattaccaacagaatactccgataggtgacggacccgtcctattacccgataaccattatctctctactcaatcggcgctctctaaagacccgaatgagaagagagatcacatggtgttgcttgagttcgtgaccgcggcggggattaccctcggaatggacgagctttataagaggtctcgtgacatttcgcacggtttcccgccagcggtcgcagctcaagacgatggaacactgccgatgagttgcgcgcaggaatcgggcatggatcggcaccctgccgcatgcgcgtctgcgcgaataaatgtgtaa

SEQ ID NO: 547 - DNA, 855 bp, Artificial Sequence
  Modified Open Reading Frame
atggtatcgaagggggaagagttgttcacgggcgtcgtgccgatcctggtggaattggacggcgacgtgaacggacataagtttagcgtgtcgggcgagggcgaaggcgatgccacctatggcaagctgaccttgaagttcatctgtactaccggcaagctgcctgtcccgtggccaaccctcgtgaccacgctgacttacggagtccagtgcttcagtaggtacccggaccacatgaagcagcacgacttctttaagtcagcgatgcccgaggggtacgtgcaggagaggaccatcttctttaaagacgatggcaactataagacccgagccgaggttaagttcgagggtgacaccctcgtcaaccgaatcgagctcaagggcatcgactttaaagaggatggtaacatcctgggccacaagctggagtacaactacaacagccacaacgtgtacatcatggcggacaagcagaagaacggtataaaggtgaactttaagatcagacacaatatcgaggacggcagcgtgcagctcgccgatcactaccagcagaacacgccgatcggcgacggccccgtgctgctgcccgataaccattatctgagcactcagagcgctctgtccaaggaccctaacgaaaagagggatcacatggtgctcctcgagttcgttaccgctgccgggatcaccctgggcatggacgagctctacaagaggtcccgcgacatcagccacggctttcctccagccgtggctgcgcaggacgacgggacccttcccatgagctgtgcccaggagtccggcatggacagacaccccgccgcctgtgccagcgcccgcatcaacgtgtaa

SEQ ID NO: 548 - DNA, 855 bp, Artificial Sequence
  Modified Open Reading Frame
atggtgtctaagggagaggagttgtttacgggcgtcgtccctatattagttgaactcgacggtgacgtaaatgggcacaagttttccgtgtcgggggaaggggaaggtgacgcaacatatgggaaattgactctaaagttcatctgcactacgggcaaattgcctgtgccatggcccaccctggttaccacgctgacatacggtgttcaatgtttctcgcggtacccggaccacatgaagcagcacgacttttttaagagtgccatgcccgagggctatgttcaagagcggacgattttcttcaaggatgatggtaactacaagactagagcagaggttaagttcgaaggtgatacgctcgttaataggattgagttgaaggggatagatttcaaggaagatggaaatatattgggtcataaattggaatataattacaactcgcataatgtgtatatcatggcggacaagcagaagaacggaataaaagttaactttaagataagacacaacattgaagatggtagtgttcagttggcagatcactatcagcaaaatacgccgattggcgatgggccggtattgttgccggacaaccattatttatcaacacaatcagccctatcaaaagacccaaacgagaaaagagatcatatggttctgctggagtttgttacggctgcaggtattacacttgggatggacgagctgtacaagcgcagtagggatatatcccacggttttcccccagccgtcgcagctcaggacgacggtacgctacccatgagttgtgcacaagaaagcggaatggatcgccacccggctgcgtgtgcatccgcgcggataaatgtgtaa

SEQ ID NO: 549 - DNA, 855 bp, Artificial Sequence
  Modified Open Reading Frame
atggtaagcaaaggcgaggagttgtttaccggagtggttccaatcttagtcgagcttgatggtgacgtcaatggccataaatttagtgtttctggcgagggtgagggcgacgctacgtatggtaaactcactcttaaattcatctgcacgactggcaagctgccagtgccctggccgacactagtaacaacattgacctacggcgttcaatgtttctcacggtatccagaccacatgaagcaacacgatttttttaaatcggcgatgccagaggggtatgtacaggagcgtactattttctttaaggatgatgggaattacaagacgcgggctgaagtaaaattcgagggtgatacgcttgtaaatcgtatcgaattgaagggaatcgactttaaagaagacgggaacatccttgggcacaagctcgagtacaattataactcacacaacgtgtatataatggctgacaagcagaagaatggaataaaagtaaatttcaagattcggcacaacattgaggacgggtcggttcagttggcagaccattaccaacaaaacactccgattggtgacggtccggttctattaccagacaatcattacctcagcactcagagtgcgctatccaaggacccgaacgagaagcgcgatcacatggtgctactggaattcgtaacagccgctgggattacgttaggtatggacgagctatataagaggtcccgcgatattagtcacggtttcccaccagcagtagctgctcaagacgatggaactttacccatgagttgcgctcaagagagcggtatggatcgtcaccccgctgcctgcgccagcgcgaggattaatgtctaa

SEQ ID NO: 550 - DNA, 855 bp, Artificial Sequence
  Modified Open Reading Frame
atggtgtcgaagggggaagagctgttcacgggcgtcgtgccgatcctggtggagttggacggcgacgtgaacggacataagtttagcgtgtccggcgagggcgaaggcgatgccacctatggcaagctgaccttgaagttcatctgtactaccggcaagctgcctgtcccgtggccaaccctcgtgaccacgctgacttacggagtccagtgcttcagtaggtacccggaccacatgaagcagcacgacttctttaagtcagcgatgcccgaggggtacgtgcaggagaggaccatcttctttaaagacgatggcaactataagacccgagccgaggttaagttcgagggtgacaccctcgtcaaccgaatcgagctcaagggcatcgactttaaagaggatggtaacatcctgggccacaagctggagtacaactacaacagccacaacgtgtacatcatggcggacaagcagaagaacggtataaaggtgaactttaagatcagacacaatatcgaggacggcagcgtgcagctcgccgatcactaccagcagaacacgccgatcggcgacggccccgtgctgctgcccgataaccattatctgagcactcagagcgctctgtccaaggaccctaacgaaaagagggatcacatggtgctcctcgagttcgttaccgctgccgggatcaccctgggcatggacgagctctacaagaggtcccgcgacatcagccacggctttcctccagccgtggctgcgcaggacgacgggacccttcccatgagctgtgcccaggagtccggcatggacagacaccccgccgcctgtgccagcgccaggatcaacgtttaa

SEQ ID NO: 551 - DNA, 855 bp, Artificial Sequence
  Modified Open Reading Frame
atggtgtccaagggcgaggagctctttaccggcgtggtgcctatcctggtggagctggacggcgacgtgaacggccacaagtttagtgtgtccggcgagggcgagggcgacgcgacctacggcaagctcacgctgaagttcatctgcaccacgggcaagctgcccgtgccctggcccacgctcgtgaccaccttgacctacggggtccagtgctttagtcgttaccccgaccacatgaagcagcacgatttcttcaagtctgccatgcccgagggctacgtccaggagagaaccatcttctttaaggacgacggtaactataagaccagagccgaggtgaagttcgagggagacaccctggtgaacagaatcgagctgaagggcatcgacttcaaggaggacggcaacatcctgggccacaaactggagtacaactacaacagccacaacgtgtacatcatggccgacaaacagaagaacgggatcaaggtgaactttaagatcaggcacaacatcgaagacggcagcgtgcagcttgccgaccactatcagcagaacacacccatcggcgacggtcccgtgctgctgcccgacaaccattatctgagcacccagagcgccctctccaaggaccctaacgagaagagagatcacatggtgcttctcgagttcgtgaccgccgccggcatcaccctgggtatggacgagctgtataagagatcccgcgacatcagccacggctttcctcccgccgtggccgcccaagacgacgggaccctgcccatgagctgcgcccaggagtccggcatggacagacaccccgccgcctgtgccagcgccaggatcaacgtgtaa

SEQ ID NO: 552 - DNA, 855 bp, Artificial Sequence
  Modified Open Reading Frame
atggtgtccaagggcgaggagctctttaccggcgtggtgcctatcctggtggagctggacggcgacgtgaacggccacaagtttagtgtgtccggcgagggcgagggcgacgccacctacggcaagctcacgctgaagttcatctgcaccacgggcaagctgcccgtgccctggcccacgctcgtgaccaccttgacctacggggtccagtgctttagtcgttaccccgaccacatgaagcagcacgatttcttcaagtctgccatgcccgagggctacgtccaggagagaaccatcttctttaaggacgacggtaactataagaccagagccgaggtgaagttcgagggagacaccctggtgaacagaatcgagctgaagggcatcgacttcaaggaggacggcaacatcctgggccacaaactggagtacaactacaacagccacaacgtgtacatcatggccgacaaacagaagaacgggatcaaggtgaactttaagatcaggcacaacatcgaagacggcagcgtgcagcttgccgaccactatcagcagaacacacccatcggcgacggtcccgtgctgctgcccgacaaccattatctgagcacccagagcgccctctccaaggaccctaacgagaagagagatcacatggtgcttctcgagttcgtgaccgccgccggcatcaccctgggtatggacgagctgtataagagatcccgcgacatcagccacggctttcctcccgccgtggccgcccaagacgacgggaccctgcccatgagctgcgcccaggagtccggcatggacagacaccccgccgcctgtgccagcgccaggatcaacgtgtaa

SEQ ID NO: 553 - DNA, 855 bp, Artificial Sequence
  Modified Open Reading Frame
atggtgtccaagggcgaggagctctttaccggcgtggtgcctatcctggtggagctggacggcgacgtgaacggccacaagtttagtgtgtccggcgagggcgagggcgacgccacctacggcaagctcacgctgaagttcatctgcaccacgggcaagctgcccgtgccctggcccacgctcgtgaccaccttgacctacggggtccagtgctttagtcgttaccccgaccacatgaagcagcacgatttcttcaagtctgccatgcccgagggctacgtccaggagagaaccatcttctttaaggacgacggtaactataagaccagagccgaggtgaagttcgagggagacaccctggtgaacagaatcgagctgaagggcatcgacttcaaggaggacggcaacatcctgggccacaaactggagtacaactacaacagccacaacgtgtacatcatggccgacaaacagaagaacgggatcaaggtgaactttaagatcaggcacaacatcgaagacggcagcgtgcagcttgccgaccactatcagcagaacacacccatcggcgacggtcccgtgctgctgcccgacaaccattatctgagcacccagagcgccctctccaaggaccctaacgagaagagagatcacatggtgctgctcgagttcgtgaccgccgccggcatcaccctgggtatggacgagctgtataagagatcccgcgacatcagccacggctttcctcccgccgtggccgcccaagacgacgggaccctgcccatgagctgcgcccaggagtccggcatggacagacaccccgccgcctgtgccagcgccaggatcaacgtgtaa

SEQ ID NO: 554 - DNA, 855 bp, Artificial Sequence
  Modified Open Reading Frame
atggtgtcaaagggtgaggaactcttcaccggagtggttcccatcttggttgagctcgatggcgacgtcaatgggcacaaattttccgtatcgggcgaaggcgaaggggacgcgacatatggaaagctgacgttgaaattcatttgcacaactggcaaattgcccgtcccgtggccaaccctagtgacaacattaacgtacggagtgcagtgtttctcgaggtatccggaccacatgaaacagcatgatttttttaagagtgccatgcctgagggttatgtccaagagcggactatcttcttcaaggacgatgggaattacaaaacgcgtgccgaagtcaagtttgagggtgacacacttgtcaacaggattgaactaaaagggattgatttcaaagaagacgggaacatcctagggcacaagctggagtataattacaactcccataatgtatatataatggctgacaaacagaagaatgggattaaggtcaacttcaagattagacacaatattgaggacggctctgtacagctagccgatcactatcagcaaaacacacccattggcgatggccccgtcctccttcctgacaaccattatttgagtacacagtctgcactcagtaaagatcctaacgaaaagcgagatcatatggttctgttggagttcgtcactgcggcaggtattaccttgggtatggacgaattatacaaacgttctagagacatctcccacggatttccacccgcagtcgccgcgcaagatgacggtacactacccatgtcttgtgcccaggagtcagggatggatcgacacccagcggcatgcgcaagcgcacgaatcaacgtgtaa

SEQ ID NO: 555 - DNA, 855 bp, Artificial Sequence
  Modified Open Reading Frame
atggtatctaagggagaggaactgttcactggtgtagtgcccattttagtcgaattggatggggacgttaacggccataaattcagcgtttcaggggagggcgaaggagacgctacttatgggaagcttaccttgaagttcatatgcactaccggaaagctgccagtgccctggcctactctagtcacaactctcacatatggggtccagtgttttagtcgttatcccgaccacatgaagcagcacgactttttcaagagtgcgatgccggagggatatgtccaagaaagaaccatcttctttaaagatgatggcaattacaaaacccgagccgaagttaagttcgagggcgataccctggtcaatagaatcgaattaaagggtatagactttaaagaagatggcaatatcttaggccacaaacttgaatacaattacaattcgcataacgtatatattatggcagataaacagaagaatggcatcaaagtgaattttaaaatccgacataacattgaagatggttccgtccagctggccgaccattaccaacagaacacgcctattggcgacggtcctgtgctccttccagataatcattatctgtcaacccaaagtgccctgtctaaggatccgaatgaaaagcgagatcacatggttttgttggaattcgtaacggcggctggtattaccctgggtatggatgagctttataaacgttctagagacatatctcacgggttcccgcccgcggtcgctgcacaagatgacgggacgctgcccatgtcatgtgctcaagaaagtggcatggataggcatccagcagcttgtgctagcgcgaggataaatgtttaa

SEQ ID NO: 556 - DNA, 855 bp, Artificial Sequence
  Modified Open Reading Frame
atggtaagcaagggtgaagaattattcacgggcgtcgtaccgatattggtcgaattagacggcgacgtaaacggtcataaattctccgtttccggtgagggagagggagacgcgacgtatggcaagctgaccttaaaattcatttgtaccaccggcaagttgcccgtcccatggccaacattggtcacaacgctaacatacggagttcagtgctttagtaggtatcctgatcatatgaagcagcacgacttcttcaagtctgcaatgccggaggggtatgtacaggaacgtacgatatttttcaaggatgatggcaactataaaacacgtgcagaggtcaaattcgagggggacactcttgtcaacagaattgaacttaaaggtattgactttaaagaagatggaaacatccttggacataagttagagtacaattacaacagtcacaacgtgtacatcatggcggacaaacaaaagaatgggattaaagttaattttaaaatccgtcataacattgaagatgggtcggtccagttagctgatcattaccaacagaacacgcctatcggcgacggcccggttctactgccggacaatcactatttgtcaactcaaagtgctcttagtaaagatccaaacgagaaacgtgatcatatggtgctgcttgagtttgttacagctgcagggataacgcttggaatggatgagttgtacaagagaagccgcgacatctcccacggtttccctccagccgtagccgcacaggacgatggaacgctacccatgtcttgcgcccaagagtccggcatggaccgacatcctgccgcttgtgcatctgcacgtataaacgtgtaa

SEQ ID NO: 557 - DNA, 855 bp, Artificial Sequence
  Modified Open Reading Frame
atggtgtccaagggcgaggagctcttcaccggcgtggtgcctatcctggtggagctggacggcgacgtgaacggccacaagtttagtgtgtccggcgagggcgagggcgacgccacctacggcaagctcacgctgaagttcatctgcaccacgggcaagctgcccgtgccctggcccacgctcgtgaccaccttgacctacggggtccagtgctttagtcgttaccccgaccacatgaagcagcacgatttcttcaagtctgccatgcccgagggctacgtccaggagagaaccatcttctttaaggacgacggtaactataagaccagagccgaggtgaagttcgagggagacaccctggtgaacagaatcgagctgaagggcatcgacttcaaggaggacggcaacatcctgggccacaaactggagtacaactacaacagccacaacgtgtacatcatggccgacaaacagaagaacgggatcaaggtgaactttaagatcaggcacaacatcgaagacggcagcgtgcagcttgccgaccactatcagcagaacacacccatcggcgacggtcccgtgctgctgcccgacaaccattatctgagcacccagagcgccctctccaaggaccctaacgagaagagagatcacatggtgctgctcgagttcgtgaccgccgccggcatcaccctgggcatggacgagctgtataagagatcccgcgacatcagccacggctttcctcccgccgtggccgcccaagacgacgggaccctgcccatgagctgcgcccaggagtccggcatggacagacaccccgccgcctgtgccagcgccaggatcaacgtgtaa

SEQ ID NO: 558 - DNA, 855 bp, Artificial Sequence
  Modified Open Reading Frame
atggtgtccaagggcgaggagctcttcaccggcgtggtgcctatcctggtggagctggacggcgacgtgaacggccacaagtttagtgtgtccggcgagggcgagggcgacgccacctacggcaagctcacgctgaagttcatctgcaccacgggcaagctgcccgtgccctggcccacgctcgtgaccaccttgacctacggggtccagtgctttagtcgttaccccgaccacatgaagcagcacgatttcttcaagtctgccatgcccgagggctacgtccaggagagaaccatcttctttaaggacgacggaaactataagaccagagccgaggtgaagttcgagggagacaccctggtgaacagaatcgagctgaagggcatcgacttcaaggaggacggcaacatcctgggccacaaactggagtacaactacaacagccacaacgtgtacatcatggccgacaaacagaagaacgggatcaaggtgaactttaagatcaggcacaacatcgaagacggcagcgtgcagcttgccgaccactatcagcagaacacacccatcggcgacggtcccgtgctgctgcccgacaaccattatctgagcacccagagcgccctctccaaggaccctaacgagaagagagatcacatggtgctgctcgagttcgtgaccgccgccggcatcaccctgggcatggacgagctgtataagagatcccgcgacatcagccacggctttcctcccgccgtggccgcccaagacgacgggaccctgcccatgagctgcgcccaggagtccggcatggacagacaccccgccgcctgtgccagcgccaggatcaacgtgtaa

SEQ ID NO: 559 - DNA, 855 bp, Artificial Sequence
  Modified Open Reading Frame
atggtgtccaagggcgaggagctcttcaccggcgtggtgcctatcctggtggagctggacggcgacgtgaacggccacaagtttagtgtgtccggcgagggcgagggcgacgccacctacggcaagctcacgctgaagttcatctgcaccacgggcaagctgcccgtgccctggcccacgctcgtgaccaccttgacctacggggtccagtgctttagtcgttaccccgaccacatgaagcagcacgatttcttcaagtctgccatgcccgagggctacgtccaggagagaaccatcttctttaaggacgacggaaactataagaccagagccgaggtgaagttcgagggagacaccctggtgaacagaatcgagctgaagggcatcgacttcaaagaggacggcaacatcctgggccacaaactggagtacaactacaacagccacaacgtgtacatcatggccgacaaacagaagaacgggatcaaggtgaactttaagatcaggcacaacatcgaagacggcagcgtgcagcttgccgaccactatcagcagaacacacccatcggcgacggtcccgtgctgctgcccgacaaccattatctgagcacccagagcgccctctccaaggaccctaacgagaagagagatcacatggtgctgctcgagttcgtgaccgccgccggcatcaccctgggcatggacgagctgtataagagatcccgcgacatcagccacggctttcctcccgccgtggccgcccaagacgacgggaccctgcccatgagctgcgcccaggagtccggcatggacagacaccccgccgcctgtgccagcgccaggatcaacgtgtaa

SEQ ID NO: 560 - DNA, 855 bp, Artificial Sequence
  Modified Open Reading Frame
atggtcagtaaaggtgaggagctatttacgggtgttgtgccaatactagttgaacttgatggtgacgtaaatggacataagttttctgtgagcggggaaggagagggtgacgcgacctacggcaagttaacattgaaatttatctgcactacaggcaagctccctgttccctggccaacacttgttacaaccctaacgtatggcgtccagtgcttctctaggtaccctgatcatatgaagcaacacgactttttcaaatccgcgatgcccgagggttatgtacaagagaggactattttttttaaggacgacggaaattataaaacaagagccgaagttaagttcgagggcgatacattggtcaaccggatagaattaaaaggtatcgatttcaaggaagatggtaacatcctaggtcacaagcttgagtacaactacaactcacataatgtgtatattatggcggacaagcaaaagaatgggataaaggttaattttaagattagacacaatatcgaagacggatcagtacagcttgcggaccactatcagcagaacacgccaattggtgacgggcctgttctgttacctgataaccactacttaagcacccaatccgcactatccaaagacccaaatgaaaaaagggatcacatggtgttgttagagtttgtcacagctgcaggaatcacacttggtatggatgaattgtataaaagaagcagagacataagccatggatttccaccagcagttgcggcccaggatgacggaacactacctatgagctgcgctcaggagtcgggtatggaccgacacccggctgcctgcgcgtcagctcgtataaacgtgtaa

SEQ ID NO: 561 - DNA, 855 bp, Artificial Sequence
  Modified Open Reading Frame
atggtgtccaagggcgaggagctcttcaccggcgtggtgcctatcctggtggagctggacggcgacgtgaacggccacaagtttagtgtgtccggcgagggcgagggcgacgccacctacggcaagctcacgctgaagttcatctgcaccacgggcaagctgcccgtgccctggcccacgctcgtgaccaccttgacctacggggtccagtgctttagtcgttaccccgaccacatgaagcagcacgatttcttcaagtctgccatgcccgagggctacgtccaggaaagaaccatcttctttaaggacgacggaaactataagaccagagccgaggtgaagttcgagggagacaccctggtgaacagaatcgagctgaagggcatcgacttcaaagaggacggcaacatcctgggccacaaactggagtacaactacaacagccacaacgtgtacatcatggccgacaaacagaagaacgggatcaaggtgaactttaagatcaggcacaacatcgaagacggcagcgtgcagcttgccgaccactatcagcagaacacacccatcggcgacggtcccgtgctgctgcccgacaaccattatctgagcacccagagcgccctctccaaggaccctaacgagaagagagatcacatggtgctgctcgagttcgtgaccgccgccggcatcaccctgggcatggacgagctgtataagagatcccgcgacatcagccacggctttcctcccgccgtggccgcccaagacgacgggaccctgcccatgagctgcgcccaggagtccggcatggacagacaccccgccgcctgtgccagcgccaggatcaacgtgtaa

SEQ ID NO: 562 - DNA, 855 bp, Artificial Sequence
  Modified Open Reading Frame
atggtgtcgaaaggcgaagagctgtttactggggtagtgccaatactggtggaactcgatggagacgtaaacggacacaagttttctgtctccggagaaggggagggcgatgcaacctatggcaagttgacactgaaattcatctgcacaactggcaaactgccagtgccatggcccaccctagtaacaacattgacatatggggtccagtgctttagtcgctatcctgaccacatgaaacagcacgacttttttaaaagtgcgatgccagaaggatatgtacaagagagaacgatatttttcaaagatgacggaaactataaaacacgagcagaagtcaagttcgagggggacacgctcgtaaaccgtatcgagctaaaaggaatagacttcaaagaggatggtaacatattaggccataaacttgagtataactataattcacacaatgtttatattatggcagataaacaaaaaaatggcattaaagtgaactttaagatccggcataacatcgaagacgggtctgtacagctggctgaccactaccagcaaaatacccctatcggcgatggcccggtgctcctgcccgacaatcactatctttcaacgcaatccgcgctttcgaaggaccctaacgaaaagagagatcatatggtgctacttgaatttgtcaccgcagctgggataacgctcggtatggatgagctgtacaaacgctcgagagatatttcacatggtttccctcctgcggttgccgctcaggatgacgggacactgcctatgtcatgcgctcaggaatccggtatggaccgtcatcctgccgcatgtgctagcgcaaggatcaatgtttaa

SEQ ID NO: 563 - DNA, 855 bp, Artificial Sequence
  Modified Open Reading Frame
atggtgtccaagggcgaggagctcttcaccggcgtggtgcctatcctggtggagctggacggcgacgtgaacggccacaagtttagtgtgtccggcgagggcgagggcgacgccacctacggcaagctcacgctgaagttcatctgcaccacgggcaagctgcccgtgccctggcccacgctcgtgaccaccttgacctacggggtccagtgctttagtcgttaccccgaccacatgaagcagcacgatttcttcaagtctgccatgcccgagggctacgtgcaggaaagaaccatcttctttaaggacgacggaaactataagaccagagccgaggtgaagttcgagggagacaccctggtgaacagaatcgagctgaagggcatcgacttcaaagaggacggcaacatcctgggccacaaactggagtacaactacaacagccacaacgtgtacatcatggccgacaaacagaagaacgggatcaaggtgaactttaagatcaggcacaacatcgaagacggcagcgtgcagcttgccgaccactatcagcagaacacacccatcggcgacggtcccgtgctgctgcccgacaaccattatctgagcacccagagcgccctctccaaggaccctaacgagaagagagatcacatggtgctgctcgagttcgtgaccgccgccggcatcaccctgggcatggacgagctgtataagagatcccgcgacatcagccacggctttcctcccgccgtggccgcccaagacgacgggaccctgcccatgagctgcgcccaggagtccggcatggacagacaccccgccgcctgtgccagcgccaggatcaacgtgtaa

SEQ ID NO: 564 - DNA, 855 bp, Artificial Sequence
  Modified Open Reading Frame
atggtttctaaaggtgaagaattattcaccggagtcgtgcctattctcgtggagctcgacggtgatgtaaacggacacaagtttagtgtgtctggagagggggagggtgacgcgacctacgggaaattaaccttaaaattcatatgtactacgggcaaacttcccgttccttggcctacccttgtcacgactcttacatacggggtgcagtgcttttctagatatcccgatcacatgaaacaacacgactttttcaaatccgcgatgccagaaggatatgtccaagaacgtacgatattcttcaaagacgacggaaactacaagacccgtgccgaggttaagttcgaaggggatacgttggtgaatcgaattgagttgaaaggcatagattttaaggaagatggtaatattttaggacacaaactcgagtacaactacaactcacacaacgtctacattatggctgacaaacaaaaaaatggtataaaagtcaactttaagattcgacacaatatcgaagatggatcggtgcagcttgccgaccactaccagcaaaatacacctattggagacggccctgtgctacttcctgacaaccactacttaagtacgcagtcggctcttagtaaagatcctaacgaaaagcgagaccacatggttctgcttgagttcgtgacagctgcgggcataacgctcggtatggacgaattatacaaacggtctagggatatttcacacggttttccaccagcggtggctgcgcaagacgacggtactcttcctatgtcatgtgcgcaagagtcggggatggatcgccatcccgctgcgtgcgcgtccgctcggatcaatgtataa

SEQ ID NO: 565 - DNA, 855 bp, Artificial Sequence
  Modified Open Reading Frame
atggtgtccaagggcgaggagctcttcaccggcgtggtgcctatcctggtggagctggacggcgacgtgaacggccacaagtttagtgtgtccggcgagggcgagggcgacgccacctacggcaagctcacgctgaagttcatctgcaccacgggcaagctgcccgtgccctggcccacgctcgtgaccaccttgacctacggggtccagtgctttagtcgttaccccgaccacatgaagcagcacgatttcttcaagtccgccatgcccgagggctacgtgcaggaaagaaccatcttctttaaggacgacggaaactataagaccagagccgaggtgaagttcgagggagacaccctggtgaacagaatcgagctgaagggcatcgacttcaaagaggacggcaacatcctgggccacaaactggagtacaactacaacagccacaacgtgtacatcatggccgacaaacagaagaacgggatcaaggtgaactttaagatcaggcacaacatcgaagacggcagcgtgcagcttgccgaccactatcagcagaacacacccatcggcgacggtcccgtgctgctgcccgacaaccattatctgagcacccagagcgccctctccaaggaccctaacgagaagagagatcacatggtgctgctcgagttcgtgaccgccgccggcatcaccctgggcatggacgagctgtataagagatcccgcgacatcagccacggctttcctcccgccgtggccgcccaagacgacgggaccctgcccatgagctgcgcccaggagtccggcatggacagacaccccgccgcctgtgccagcgccaggatcaacgtgtaa

SEQ ID NO: 566 - DNA, 855 bp, Artificial Sequence
  Modified Open Reading Frame
atggtgtccaagggcgaggagctcttcaccggcgtggtgcctatcctggtggagctggacggcgacgtgaacggccacaagtttagtgtgtccggcgagggcgagggcgacgccacctacggcaagctcacgctgaagttcatctgcaccacgggcaagctgcccgtgccctggcccacgctcgtgaccaccctgacctacggggtccagtgctttagtcgttaccccgaccacatgaagcagcacgatttcttcaagtccgccatgcccgagggctacgtgcaggaaagaaccatcttctttaaggacgacggaaactataagaccagagccgaggtgaagttcgagggagacaccctggtgaacagaatcgagctgaagggcatcgacttcaaagaggacggcaacatcctgggccacaaactggagtacaactacaacagccacaacgtgtacatcatggccgacaaacagaagaacgggatcaaggtgaactttaagatcaggcacaacatcgaagacggcagcgtgcagcttgccgaccactatcagcagaacacacccatcggcgacggtcccgtgctgctgcccgacaaccattatctgagcacccagagcgccctctccaaggaccctaacgagaagagagatcacatggtgctgctcgagttcgtgaccgccgccggcatcaccctgggcatggacgagctgtataagagatcccgcgacatcagccacggctttcctcccgccgtggccgcccaagacgacgggaccctgcccatgagctgcgcccaggagtccggcatggacagacaccccgccgcctgtgccagcgccaggatcaacgtgtaa

SEQ ID NO: 567 - DNA, 855 bp, Artificial Sequence
  Modified Open Reading Frame
atggtcagcaagggtgaggaactgttcactggcgttgtacctatccttgtagagctagatggtgatgtcaatgggcacaaattctctgtaagtggagagggggagggcgatgccacgtacggaaaattaaccctgaaattcatttgtacaacaggaaaattacccgtcccttggcctacattggtcactactcttacgtatggcgtacaatgtttttcccggtacccagaccatatgaaacagcatgatttcttcaaatccgcgatgccagagggatacgtacaggagaggacaatattctttaaggatgacggaaactataaaacaagagctgaagtcaagtttgagggcgatacattggttaatcgcatagagctcaaaggaattgattttaaggaggatggtaatatactgggccacaaattagagtacaactacaactcgcataacgtttatataatggcagataagcaaaagaatggcataaaggtcaactttaagattagacacaatatagaggatggtagcgttcaactcgcagatcattaccagcagaataccccaattggtgatggccctgtgctccttcccgacaatcactacctcagtacgcagagcgctctatcgaaagaccccaatgaaaagcgtgatcacatggtccttctcgaatttgtcaccgccgcaggtataaccctcggaatggacgagctatacaagcgctccagggatataagtcacgggttccctccagctgtggcagctcaggacgatggtactctacctatgtcttgcgcacaggagtccgggatggaccggcatcccgccgcatgtgcgagcgcacgtataaacgtataa

SEQ ID NO: 568 - DNA, 855 bp, Artificial Sequence
  Modified Open Reading Frame
atggtgtccaagggcgaggagctcttcaccggcgtggtgcctatcctggtggagctggacggcgacgtgaacggccacaagtttagtgtgtccggcgagggcgagggcgacgccacctacggcaagctcacgctgaagttcatctgcaccacgggcaagctgcccgtgccctggcccacgctcgtgaccaccctgacctacggggttcagtgctttagccgttaccccgaccacatgaagcagcacgatttcttcaagtccgccatgcccgagggctacgtgcaggaaagaaccatcttctttaaggacgacggaaactataagaccagagccgaggtgaagttcgagggagacaccctggtgaacagaatcgagctgaagggcatcgacttcaaagaggacggcaacatcctgggccacaaactggagtacaactacaacagccacaacgtgtacatcatggccgacaaacagaagaacgggatcaaggtgaactttaagatcaggcacaacatcgaagacggcagcgtgcagcttgccgaccactatcagcagaacacacccatcggcgacggtcccgtgctgctgcccgacaaccattatctgagcacccagagcgccctctccaaggaccctaacgagaagagagatcacatggtgctgctcgagttcgtgaccgccgccggcatcaccctgggcatggacgagctgtataagagatcccgcgacatcagccacggctttcctcccgccgtggccgcccaagacgacgggaccctgcccatgagctgcgcccaggagtccggcatggacagacaccccgccgcctgtgccagcgccaggatcaacgtgtaa

SEQ ID NO: 569 - DNA, 855 bp, Artificial Sequence
  Modified Open Reading Frame
atggtgtccaagggcgaggagctcttcaccggcgtggtgcctatcctggtggagctggacggcgacgtgaacggccacaagtttagtgtgtccggcgagggcgagggcgacgccacctacggcaagctcacgctgaagttcatctgcaccacgggcaagctgcccgtgccctggcccacgctcgtgaccaccctgacctacggggtccagtgctttagccgttaccccgaccacatgaagcagcacgacttcttcaagtccgccatgcccgagggctacgtgcaggaaagaaccatcttctttaaggacgacggaaactataagaccagagccgaggtgaagttcgagggagacaccctggtgaacagaatcgagctgaagggcatcgacttcaaagaggacggcaacatcctgggccacaaactggagtacaactacaacagccacaacgtgtacatcatggccgacaaacagaagaacgggatcaaggtgaactttaagatcaggcacaacatcgaagacggcagcgtgcagcttgccgaccactatcagcagaacacacccatcggcgacggtcccgtgctgctgcccgacaaccattatctgagcacccagagcgccctctccaaggaccctaacgagaagagagatcacatggtgctgctcgagttcgtgaccgccgccggcatcaccctgggcatggacgagctgtataagagatcccgcgacatcagccacggctttcctcccgccgtggccgcccaagacgacgggaccctgcccatgagctgcgcccaggagtccggcatggacagacaccccgccgcctgtgccagcgccaggatcaacgtgtaa

SEQ ID NO: 570 - DNA, 855 bp, Artificial Sequence
  Modified Open Reading Frame
atggtgtccaagggcgaggagctcttcaccggcgtggtgcctatcctggtggagctggacggcgacgtgaacggccacaagtttagtgtgtccggcgagggcgagggcgacgccacctacggcaagctcacgctgaagttcatctgcaccacgggcaagctgcccgtgccctggcccaccctcgtgaccaccctgacctacggggtccagtgctttagccgttaccccgaccacatgaagcagcacgacttcttcaagtccgccatgcccgagggctacgtgcaggaaagaaccatcttctttaaggacgacggaaactataagaccagagccgaggtgaagttcgagggagacaccctggtgaacagaatcgagctgaagggcatcgacttcaaagaggacggcaacatcctgggccacaaactggagtacaactacaacagccacaacgtgtacatcatggccgacaaacagaagaacgggatcaaggtgaactttaagatcagacacaacatcgaagacggcagcgtgcagcttgccgaccactatcagcagaacacacccatcggcgacggtcccgtgctgctgcccgacaaccattatctgagcacccagagcgccctctccaaggaccctaacgagaagagagatcacatggtgctgctcgagttcgtgaccgccgccggcatcaccctgggcatggacgagctgtataagagatcccgcgacatcagccacggctttcctcccgccgtggccgcccaagacgacgggaccctgcccatgagctgcgcccaggagtccggcatggacagacaccccgccgcctgtgccagcgccaggatcaacgtgtaa

SEQ ID NO: 571 - DNA, 855 bp, Artificial Sequence
  Modified Open Reading Frame
atggtgtccaagggcgaggagctcttcaccggcgtggtgcctatcctggtggagctggacggcgacgtgaacggccacaagtttagcgtgtccggcgagggcgagggcgacgccacctacggcaagctcacgctgaagttcatctgcaccacgggcaagctgcccgtgccctggcccaccctcgtgaccaccctgacctacggggtccagtgctttagccgttaccccgaccacatgaagcagcacgacttcttcaagtccgccatgcccgagggctacgtgcaggaaagaaccatcttctttaaggacgacggaaactataagaccagagccgaggtgaagttcgagggagacaccctggtgaacagaatcgagctgaagggcatcgacttcaaagaggacggcaacatcctgggccacaaactggagtacaactacaacagccacaacgtgtacatcatggccgacaaacagaagaacgggatcaaggtgaactttaagatcagacacaacatcgaagacggcagcgtgcagcttgccgaccactatcagcagaacacacccatcggcgacggtcccgtgctgctgcccgacaaccattatctgagcacccagagcgccctctccaaggaccctaacgagaagagagatcacatggtgctgctcgagttcgtgaccgccgccggcatcaccctgggcatggacgagctgtataagagatcccgcgacatcagccacggctttcctcccgccgtggccgcccaagacgacgggaccctgcccatgagctgcgcccaggagtccggcatggacagacaccccgccgcctgtgccagcgccaggatcaacgtgtaa

SEQ ID NO: 572 - DNA, 855 bp, Artificial Sequence
  Modified Open Reading Frame
atggtgtcgaagggggaagagctgttcacgggcgtggtgccgatcctggtggagctggacggcgacgtgaacggacataagtttagcgtatccggcgagggcgaaggcgatgccacctatggcaagctgaccttgaagttcatctgcactaccggcaagctgcctgtgccctggccaaccctcgtgaccacgctgacttacggagtccagtgcttcagtaggtacccggaccacatgaagcagcacgacttctttaagtcagcgatgcccgaggggtacgtgcaggagaggaccatcttctttaaagacgatggcaactataagacccgagccgaggttaagttcgagggtgacaccctcgtcaaccgaatcgagctcaagggcatcgactttaaagaggatggtaacatcctgggccacaagctggagtacaactacaacagccacaacgtgtacatcatggccgacaagcagaagaacggtatcaaggtgaactttaagatcagacacaatatcgaggacggcagcgtgcagctcgccgatcactaccagcagaacacgccgatcggcgacggccccgtgctgctgcccgataaccattacctgagcactcagagcgctctgtccaaggaccctaacgaaaagagggatcacatggtgctcctcgagttcgttaccgctgccggcatcaccctgggcatggacgagctctacaagaggtcccgcgacatcagccacggctttcctccagccgtggctgcgcaggacgacgggacccttcccatgagctgtgcccaggagtccggcatggacagacaccccgccgcctgtgccagcgccaggatcaacgtttaa

SEQ ID NO: 573 - DNA, 855 bp, Artificial Sequence
  Modified Open Reading Frame
atggtgtccaagggcgaggagctcttcaccggcgtggtgcctatcctggtggagctggacggcgacgtgaacggccacaagtttagcgtgtccggcgagggcgaaggcgacgccacctacggcaagctcacgctgaagttcatctgcaccacgggcaagctgcccgtgccctggcccaccctcgtgaccaccctgacctacggggtccagtgctttagccgttaccccgaccacatgaagcagcacgacttcttcaagtccgccatgcccgagggctacgtgcaggaaagaaccatcttctttaaggacgacggaaactataagaccagagccgaggtgaagttcgagggagacaccctggtgaacagaatcgagctgaagggcatcgacttcaaagaggacggcaacatcctgggccacaaactggagtacaactacaacagccacaacgtgtacatcatggccgacaaacagaagaacgggatcaaggtgaactttaagatcagacacaacatcgaagacggcagcgtgcagcttgccgaccactatcagcagaacacacccatcggcgacggtcccgtgctgctgcccgacaaccattatctgagcacccagagcgccctctccaaggaccctaacgagaagagagatcacatggtgctgctcgagttcgtgaccgccgccggcatcaccctgggcatggacgagctgtataagagatcccgcgacatcagccacggctttcctcccgccgtggccgcccaagacgacgggaccctgcccatgagctgcgcccaggagtccggcatggacagacaccccgccgcctgtgccagcgccaggatcaacgtgtaa

SEQ ID NO: 574 - DNA, 855 bp, Artificial Sequence
  Modified Open Reading Frame
atggtgtccaagggcgaggagctcttcaccggcgtggtgcctatcctggtggagctggacggcgacgtgaacggccacaagtttagcgtgtccggcgagggcgaaggcgacgccacctacggcaagctgaccctgaagttcatctgcaccaccggcaagctgcccgtgccctggcccaccctcgtgaccaccctgacctacggggtccagtgctttagccgttaccccgaccacatgaagcagcacgacttcttcaagtccgccatgcccgagggctacgtgcaggaaagaaccatcttctttaaggacgacggaaactataagaccagagccgaggtgaagttcgagggagacaccctggtgaacagaatcgagctgaagggcatcgacttcaaagaggacggcaacatcctgggccacaaactggagtacaactacaacagccacaacgtgtacatcatggccgacaaacagaagaacgggatcaaggtgaactttaagatcagacacaacatcgaagacggcagcgtgcagcttgccgaccactatcagcagaacacacccatcggcgacggtcccgtgctgctgcccgacaaccattatctgagcacccagagcgccctctccaaggaccctaacgagaagagagatcacatggtgctgctcgagttcgtgaccgccgccggcatcaccctgggcatggacgagctgtataagagatcccgcgacatcagccacggctttcctcccgccgtggccgcccaagacgacgggaccctgcccatgagctgcgcccaggagtccggcatggacagacaccccgccgcctgtgccagcgccaggatcaacgtgtaa

SEQ ID NO: 575 - DNA, 855 bp, Artificial Sequence
  Modified Open Reading Frame
atggtgtccaagggcgaggagctcttcaccggcgtggtgcctatcctggtggagctggacggcgacgtgaacggccacaagtttagcgtgtccggcgagggcgaaggcgacgccacctacggcaagctgaccctgaagttcatctgcaccaccggcaaactgcccgtgccctggcccaccctcgtgaccaccctgacctacggggtccagtgctttagccgttaccccgaccacatgaagcagcacgacttcttcaagtccgccatgcccgagggctacgtgcaggaaagaaccatcttctttaaggacgacggaaactataagaccagagccgaggtgaagttcgagggagacaccctggtgaacagaatcgagctgaagggcatcgacttcaaagaggacggcaacatcctgggccacaaactggagtacaactacaacagccacaacgtgtacatcatggccgacaaacagaagaacgggatcaaggtgaactttaagatcagacacaacatcgaagacggcagcgtgcagcttgccgaccactatcagcagaacacacccatcggcgacggtcccgtgctgctgcccgacaaccattatctgagcacccagagcgccctctccaaggaccctaacgagaagagagatcacatggtgctgctcgagttcgtgaccgccgccggcatcaccctgggcatggacgagctgtataagagatcccgcgacatcagccacggctttcctcccgccgtggccgcccaagacgacgggaccctgcccatgagctgcgcccaggagtccggcatggacagacaccccgccgcctgtgccagcgccaggatcaacgtgtaa

SEQ ID NO: 576 - DNA, 855 bp, Artificial Sequence
  Modified Open Reading Frame
atggtgagtaagggagaagagttgttcaccggcgtggtgccaatactggtagagctggatggggatgtgaacggacataagttctctgtgtccggtgagggtgagggtgatgccacctatggcaaactcaccctcaagttcatatgcaccaccggcaaactaccagtaccttggcccacgctggtaacaactcttacatatggcgtgcagtgcttttcacgttatccagatcacatgaaacagcacgatttctttaagtccgccatgcccgagggttacgtccaggaacgtaccatcttctttaaggacgacggaaattataagacgcgtgctgaggtcaagttcgagggtgataccctcgtgaaccgaatcgagctgaagggcatcgatttcaaagaagatggtaacatcctgggccacaaactcgagtataactacaacagccacaatgtgtacatcatggctgataagcagaagaacgggatcaaggtgaattttaaaattcgccataatatagaggacggcagcgtacagctcgccgaccactatcaacaaaacacccccattggggatggtcccgttcttctgccggacaatcattatttgtccacgcagtcagctttgtcgaaggaccccaacgaaaagcgtgatcacatggttttgctcgagtttgtgactgccgcaggcataaccctgggcatggacgagctttataagagatcgcgcgacataagccacggctttccaccagccgtggcagcgcaagacgacgggaccctgcccatgagctgcgctcaggagtccggcatggacaggcatcccgctgcgtgcgctagtgcaagaataaatgtataa

SEQ ID NO: 577 - DNA, 855 bp, Artificial Sequence
  Modified Open Reading Frame
atggtgtccaagggcgaggagctcttcaccggcgtggtgcctatcctggtggagctggacggcgacgtgaacggccacaagtttagcgtgtccggcgagggcgaaggcgacgccacctacggcaagctgaccctgaagttcatctgcaccaccggcaaactgcccgtgccctggcccaccctcgtgaccaccctgacctacggggtccagtgctttagccgataccccgaccacatgaagcagcacgacttcttcaagtccgccatgcccgagggctacgtgcaggaaagaaccatcttctttaaggacgacggaaactataagaccagagccgaggtgaagttcgagggagacaccctggtgaacagaatcgagctgaagggcatcgacttcaaagaggacggcaacatcctgggccacaaactggagtacaactacaacagccacaacgtgtacatcatggccgacaaacagaagaacgggatcaaggtgaactttaagatcagacacaacatcgaagacggcagcgtgcagcttgccgaccactatcagcagaacacacccatcggcgacggtcccgtgctgctgcccgacaaccattatctgagcacccagagcgccctctccaaggaccctaacgagaagagagatcacatggtgctgctcgagttcgtgaccgccgccggcatcaccctgggcatggacgagctgtataagagatcccgcgacatcagccacggctttcctcccgccgtggccgcccaagacgacgggaccctgcccatgagctgcgcccaggagtccggcatggacagacaccccgccgcctgtgccagcgccaggatcaacgtgtaa

SEQ ID NO: 578 - DNA, 855 bp, Artificial Sequence
  Modified Open Reading Frame
atggtgtccaagggcgaggagctcttcaccggcgtggtgcctatcctggtggagctggacggcgacgtgaacggccacaagtttagcgtgtccggcgagggcgaaggcgacgccacctacggcaagctgaccctgaagttcatctgcaccaccggcaaactgcccgtgccctggcccaccctcgtgaccaccctgacctacggggtccagtgctttagccgataccccgaccacatgaagcagcacgacttcttcaagtccgccatgcccgagggctacgtgcaggaaagaaccatcttctttaaggacgacggaaactataagaccagagccgaggtgaagttcgagggagacaccctggtgaacagaatcgagctgaagggcatcgacttcaaagaggacggcaacatcctgggccacaaactggagtacaactacaacagccacaacgtgtacatcatggccgacaaacagaagaacgggatcaaggtgaactttaagatcagacacaacatcgaagacggcagcgtgcagcttgccgaccactatcagcagaacacacccatcggcgacggtcccgtgctgctgcccgacaaccattacctgagcacccagagcgccctctccaaggaccctaacgagaagagagatcacatggtgctgctcgagttcgtgaccgccgccggcatcaccctgggcatggacgagctgtataagagatcccgcgacatcagccacggctttcctcccgccgtggccgcccaagacgacgggaccctgcccatgagctgcgcccaggagtccggcatggacagacaccccgccgcctgtgccagcgccaggatcaacgtgtaa

SEQ ID NO: 579 - DNA, 855 bp, Artificial Sequence
  Modified Open Reading Frame
atggtgtccaagggcgaggagctcttcaccggcgtggtgcctatcctggtggagctggacggcgacgtgaacggccacaagtttagcgtgtccggcgagggcgaaggcgacgccacctacggcaagctgaccctgaagttcatctgcaccaccggcaaactgcccgtgccctggcccaccctcgtgaccaccctgacctacggggtccagtgctttagccgataccccgaccacatgaagcagcacgacttcttcaagtccgccatgcccgagggctacgtgcaggaaagaaccatcttctttaaggacgacggaaactataagaccagagccgaggtgaagttcgagggagacaccctggtgaacagaatcgagctgaagggcatcgacttcaaagaggacggcaacatcctgggccacaaactggagtacaactacaacagccacaacgtgtacatcatggccgacaaacagaagaacgggatcaaggtgaactttaagatcagacacaacatcgaagacggcagcgtgcagcttgccgaccactatcagcagaacacacccatcggcgacggtcccgtgctgctgcccgacaaccattacctgagcacccagagcgccctgtccaaggaccctaacgagaagagagatcacatggtgctgctcgagttcgtgaccgccgccggcatcaccctgggcatggacgagctgtataagagatcccgcgacatcagccacggctttcctcccgccgtggccgcccaagacgacgggaccctgcccatgagctgcgcccaggagtccggcatggacagacaccccgccgcctgtgccagcgccaggatcaacgtgtaa

SEQ ID NO: 580 - DNA, 855 bp, Artificial Sequence
  Modified Open Reading Frame
atggtgtccaagggcgaggagctcttcaccggcgtggtgcctatcctggtggagctggacggcgacgtgaacggccacaagtttagcgtgtccggcgagggcgaaggcgacgccacctacggcaagctgaccctgaagttcatctgcaccaccggcaaactgcccgtgccctggcccaccctcgtgaccaccctgacctacggggtccagtgcttcagccgataccccgaccacatgaagcagcacgacttcttcaagtccgccatgcccgagggctacgtgcaggaaagaaccatcttctttaaggacgacggaaactataagaccagagccgaggtgaagttcgagggagacaccctggtgaacagaatcgagctgaagggcatcgacttcaaagaggacggcaacatcctgggccacaaactggagtacaactacaacagccacaacgtgtacatcatggccgacaaacagaagaacgggatcaaggtgaactttaagatcagacacaacatcgaagacggcagcgtgcagcttgccgaccactaccagcagaacacacccatcggcgacggtcccgtgctgctgcccgacaaccattacctgagcacccagagcgccctgtccaaggaccctaacgagaagagagatcacatggtgctgctcgagttcgtgaccgccgccggcatcaccctgggcatggacgagctgtataagagatcccgcgacatcagccacggctttcctcccgccgtggccgcccaagacgacgggaccctgcccatgagctgcgcccaggagtccggcatggacagacaccccgccgcctgtgccagcgccaggatcaacgtgtaa

SEQ ID NO: 581 - DNA, 855 bp, Artificial Sequence
  Modified Open Reading Frame
atggtgtccaagggcgaggagctcttcaccggcgtggtgcctatcctggtggagctggacggcgacgtgaacggccacaagtttagcgtgtccggcgagggcgaaggcgacgccacctacggcaagctgaccctgaagttcatctgcaccaccggcaaactgcccgtgccctggcccaccctcgtgaccaccctgacctacggggtccagtgcttcagcagataccccgaccacatgaagcagcacgacttcttcaagtccgccatgcccgagggctacgtgcaggaaagaaccatcttctttaaggacgacggaaactataagaccagagccgaggtgaagttcgagggagacaccctggtgaacagaatcgagctgaagggcatcgacttcaaagaggacggcaacatcctgggccacaaactggagtacaactacaacagccacaacgtgtacatcatggccgacaaacagaagaacgggatcaaggtgaactttaagatcagacacaacatcgaagacggcagcgtgcagcttgccgaccactaccagcagaacacacccatcggcgacggtcccgtgctgctgcccgacaaccattacctgagcacccagagcgccctgtccaaggaccctaacgagaagagagatcacatggtgctgctcgagttcgtgaccgccgccggcatcaccctgggcatggacgagctgtataagagatcccgcgacatcagccacggctttcctcccgccgtggccgcccaagacgacgggaccctgcccatgagctgcgcccaggagtccggcatggacagacaccccgccgcctgtgccagcgccaggatcaacgtgtaa

SEQ ID NO: 582 - DNA, 855 bp, Artificial Sequence
  Modified Open Reading Frame
atggtgtccaagggcgaggagctcttcaccggcgtggtgcctatcctggtggagctggacggcgacgtgaacggccacaagtttagcgtgtccggcgagggcgaaggcgacgccacctacggcaagctgaccctgaagttcatctgcaccaccggcaaactgcccgtgccctggcccaccctcgtgaccaccctgacctacggagtccagtgcttcagcagataccccgaccacatgaagcagcacgacttcttcaagtccgccatgcccgagggctacgtgcaggaaagaaccatcttctttaaggacgacggaaactataagaccagagccgaggtgaagttcgagggagacaccctggtgaacagaatcgagctgaagggcatcgacttcaaagaggacggcaacatcctgggccacaaactggagtacaactacaacagccacaacgtgtacatcatggccgacaaacagaagaacgggatcaaggtgaactttaagatcagacacaacatcgaagacggcagcgtgcagcttgccgaccactaccagcagaacacacccatcggcgacggtcccgtgctgctgcccgacaaccattacctgagcacccagagcgccctgtccaaggaccctaacgagaagagagatcacatggtgctgctcgagttcgtgaccgccgccggcatcaccctgggcatggacgagctgtataagagatcccgcgacatcagccacggctttcctcccgccgtggccgcccaagacgacgggaccctgcccatgagctgcgcccaggagtccggcatggacagacaccccgccgcctgtgccagcgccaggatcaacgtgtaa

SEQ ID NO: 583 - DNA, 855 bp, Artificial Sequence
  Modified Open Reading Frame
atggtgtccaagggcgaggagctcttcaccggcgtggtgcctatcctggtggagctggacggcgacgtgaacggccacaagtttagcgtgtccggcgagggcgaaggcgacgccacctacggcaagctgaccctgaagttcatctgcaccaccggcaaactgcccgtgccctggcccaccctcgtgaccaccctgacctacggagtccagtgcttcagcagataccccgaccacatgaagcagcacgacttcttcaagtccgccatgcccgagggctacgtgcaggaaagaaccatcttctttaaggacgacggaaactataagaccagagccgaggtgaagttcgagggagacaccctggtgaacagaatcgagctgaagggcatcgacttcaaagaggacggcaacatcctgggccacaaactggagtacaactacaacagccacaacgtgtacatcatggccgacaaacagaagaacgggatcaaggtgaactttaagatcagacacaacatcgaagacggcagcgtgcagcttgccgaccactaccagcagaacacacccatcggcgacggacccgtgctgctgcccgacaaccattacctgagcacccagagcgccctgtccaaggaccctaacgagaagagagatcacatggtgctgctcgagttcgtgaccgccgccggcatcaccctgggcatggacgagctgtataagagatcccgcgacatcagccacggctttcctcccgccgtggccgcccaagacgacgggaccctgcccatgagctgcgcccaggagtccggcatggacagacaccccgccgcctgtgccagcgccaggatcaacgtgtaa

SEQ ID NO: 584 - DNA, 855 bp, Artificial Sequence
  Modified Open Reading Frame
atggtatctaagggtgaagagctttttacaggggtagtacccatacttgtcgagcttgacggagacgtcaacggtcacaagttcagtgtgagcggtgagggtgagggagacgccacatatggcaaattaactttgaagttcatctgcacaaccgggaaactcccggttccttggcctactctggtgacaacattgacatacggagttcagtgcttcagtcgttaccctgaccacatgaagcagcatgacttctttaagagtgcgatgcctgagggttatgttcaggagcgcactatcttcttcaaggacgacggtaattataagacccgtgctgaagtaaaattcgaaggagatacgctcgtgaacaggatcgaactcaaaggcatcgactttaaagaagatggtaacatattaggccataagttggaatacaactacaatagccataatgtgtatatcatggccgataagcagaagaacggtatcaaagttaatttcaagatcaggcacaacatcgaagatggatctgttcaactagcagaccattatcagcaaaatacgccgatcggtgatggcccggtcttgctccctgacaaccattacctctctacacaatcggccctgagcaaagacccgaacgaaaagcgagaccatatggtcttgcttgaattcgttacggccgctgggatcacgttgggcatggacgagctgtataaacgcagccgtgacatctcacacggattcccaccggcggttgctgctcaggacgatgggacattgccgatgtcgtgcgcacaagagtcagggatggaccgccacccggctgcttgtgcgtcggcacggatcaatgtctaa

SEQ ID NO: 585 - DNA, 855 bp, Artificial Sequence
  Modified Open Reading Frame
atggtgagtaagggagaagagttgttcaccggcgtggtgccaatactggtagagctggatggggacgtgaacggacataagttcagcgtgtccggtgagggtgagggtgatgccacctatggcaaactcaccctcaagttcatctgcaccaccggcaaactaccagtaccttggcccacgctggtaacaactcttacatatggcgtgcagtgcttttcacgttatccagatcacatgaaacagcacgatttctttaagtccgccatgcccgagggttacgtccaggaacgtaccatcttctttaaggacgacggtaattataaaacgcgtgctgaggtcaaattcgagggtgataccctcgtgaaccgaatcgagctgaagggcatcgatttcaaagaagatggtaatatcctgggccacaaactcgagtataactataacagccacaatgtgtacatcatggctgataagcagaagaacgggatcaaagtaaactttaaaattcgccataatatagaggacggcagcgtacagctcgccgaccactatcagcagaatacacctattggcgacggtcccgttcttctgccggacaatcattatttgtccacccagtcagctttgtcgaaggaccccaacgaaaagcgtgatcatatggttttgctcgagtttgtgactgccgcaggcataaccctgggcatggacgagctttataagagatcgcgcgacataagccacggctttccaccagccgtggcagcgcaagacgacgggaccctgcccatgagctgcgctcaggagtccggcatggacaggcatcccgctgcgtgcgctagtgcaagaataaatgtatag

SEQ ID NO: 586 - DNA, 855 bp, Artificial Sequence
  Modified Open Reading Frame
atggtttcgaagggggaggagctgttcaccggcgtggtgcctatcctagtggagctggacggcgacgtgaacggacataagtttagcgtgagcggcgagggcgaaggcgacgccacctacggcaagctgaccttgaagttcatctgcaccaccggcaaactgcctgtgccctggcccaccttggtcaccaccttgacgtacggagtccagtgtttcagtagatacccggatcacatgaaacagcacgacttcttcaagagtgccatgcccgagggctacgtgcaagaacgaactatcttcttcaaggacgacggaaattacaagaccagggccgaggtcaagttcgagggcgacaccttggtgaaccggatcgagctgaagggcatcgacttcaaggaggacggcaacatcttgggccacaaactagaatataattataacagccataatgtgtacattatggccgacaagcagaagaacggcattaaggtgaactttaagatcagacacaacatcgaagacggctccgtgcagctcgctgatcactaccaacaaaacacgccgatcggcgatggtcccgtgctactgcctgataaccactacttgagtactcagagcgctctgagcaaggacccgaatgaaaagcgagatcacatggtcctgctcgagttcgtgaccgccgccggcatcacgctgggcatggacgagttgtacaagcgttctcgcgatatttcccacggcttcccacccgcggtggccgcccaagacgatgggaccctgccaatgagctgcgcccaggagtctggcatggacagacatcccgccgcatgtgctagcgcacgtatcaacgtgtga

SEQ ID NO: 587 - DNA, 855 bp, Artificial Sequence
  Modified Open Reading Frame
atggtttcgaagggggaggagctgttcaccggcgtggtgcctatcctagtggagctggacggcgacgtgaacggacataagtttagcgtgtccggcgagggcgaaggcgacgccacctacggcaagctgaccttgaagttcatctgcaccaccggcaaactgcctgtgccctggcccaccttggtcaccaccttgacgtacggagtccagtgcttcagtagatacccggatcacatgaagcagcacgacttcttcaagagtgccatgcccgagggctacgtgcaagaacgaactatcttcttcaaggacgacggaaattacaagaccagggccgaggtgaagttcgagggcgacaccttggtgaaccggatcgagctgaagggcatcgacttcaaggaggacggcaacatcttgggccacaaactagaatataattataacagccataatgtgtacattatggccgacaagcagaagaacggcattaaggtgaactttaagatcagacacaacatcgaagacggctccgtgcagctcgctgatcactaccaacagaacacgccgatcggcgatggtcccgtgctactgcctgataaccactacctctctacccagagcgctctgagcaaggaccctaatgagaagcgagatcacatggtgctgctcgagttcgtgaccgccgccggcatcacgctgggcatggacgagttgtacaagcgttctcgcgatatttcccacggcttcccacccgcggtggccgcccaagacgatgggaccctgccaatgagctgcgcccaggagtctggcatggacagacatcccgccgcatgtgctagcgcacgtatcaacgtgtga

SEQ ID NO: 588 - DNA, 855 bp, Artificial Sequence
  Modified Open Reading Frame
atggtttcgaagggggaggagctgttcaccggcgtggtgcctatcctggtggagctggacggcgacgtgaacggccacaagtttagcgtgtccggcgagggcgaaggcgacgccacctacggcaagctgaccttgaagttcatctgcaccaccggcaaactgcctgtgccctggcccaccttggtcaccaccttgacgtacggagtccagtgcttcagtagataccccgatcacatgaagcagcacgacttcttcaagagtgccatgcccgagggctacgtgcaagaaagaactatcttcttcaaggacgacggaaattacaagaccagggccgaggtgaagttcgagggagacaccctggtgaacagaatcgagctgaagggcatcgacttcaaggaggacggcaacatcttgggccacaaactagagtacaactataacagccataatgtgtacattatggccgacaagcagaagaacggcattaaggtgaactttaagatcagacacaacatcgaagacggctccgtgcagctcgctgatcactaccaacagaacacgccgatcggcgatggtcccgtgctactgcctgataaccactacctgagcacccagagcgctctgagcaaggaccctaatgagaagcgagatcacatggtgctgctcgagttcgtgaccgccgccggcatcacgctgggcatggacgagttgtacaagcgttctcgcgatatttcccacggcttcccacccgcggtggccgcccaagacgatgggaccctgccaatgagctgcgcccaggagtctggcatggacagacatcccgccgcatgtgctagcgcacgtatcaacgtgtga

SEQ ID NO: 589 - DNA, 855 bp, Artificial Sequence
  Modified Open Reading Frame
atggtttcgaagggggaggagctgttcaccggcgtggtgcctatcctggtggagctggacggcgacgtgaacggccacaagtttagcgtgtccggcgagggcgaaggcgacgccacctacggcaagctgaccctgaagttcatctgcaccaccggcaaactgcccgtgccctggcccaccttggtcaccaccttgacgtacggagtccagtgcttcagtagataccccgatcacatgaagcagcacgacttcttcaagagtgccatgcccgagggctacgtgcaagaaagaactatcttcttcaaggacgacggaaattacaagaccagggccgaggtgaagttcgagggagacaccctggtgaacagaatcgagctgaagggcatcgacttcaaggaggacggcaacatcttgggccacaaactagagtacaactataacagccataatgtgtacatcatggccgacaagcagaagaacggcattaaggtgaactttaagatcagacacaacatcgaagacggctccgtgcagctcgctgatcactatcaacagaacacgccgatcggcgatggtcccgtgctactgcccgataaccactacctgagcacccagagcgctctgagcaaggaccctaatgagaagcgagatcacatggtgctgctcgagttcgtgaccgccgccggcatcacgctgggcatggacgagttgtacaagcgttctcgcgatatttcccacggcttcccacccgcggtggccgcccaagacgatgggaccctgccaatgagctgcgcccaggagtccggcatggacagacatcccgccgcatgtgctagcgcacgtatcaacgtgtga

SEQ ID NO: 590 - DNA, 855 bp, Artificial Sequence
  Modified Open Reading Frame
atggtttctaagggcgaggaactctttaccggcgttgttcccattctcgttgaacttgatggtgacgtgaatggacataaattcagcgtctcgggtgaaggcgagggggatgcgacgtacggaaaacttacccttaagtttatctgtacgactgggaaactcccagttccatggccgacactggttactacgttaacctacggagtccagtgttttagccgatatccggaccacatgaagcagcacgacttctttaagagcgccatgccagagggttacgttcaagaacgtaccatcttctttaaagacgacggcaactataaaactagggccgaagtcaaattcgagggcgataccctagtcaaccgaatcgagttgaagggtatcgacttcaaggaagatggtaatattctaggccataaactagagtataattataactctcataatgtttatatcatggcggataaacagaaaaatggcatcaaggtgaattttaagatacggcataacattgaagacggttcagtacagttagccgatcactaccagcagaacacaccgataggcgacgggccggtgctgttgccagataaccattatctgtcaacgcagtcggcactgtcgaaagatcctaatgaaaagagggatcacatggttctgctagagttcgtcactgctgccggcataaccctgggcatggacgagctgtacaagcgttcccgggacatttcgcacggctttcccccagcggttgccgcgcaggatgacggaactctcccgatgtcgtgcgctcaggagtccggaatggatcgacatcccgccgcctgcgcgagcgctcgaattaatgtatag

SEQ ID NO: 591 - DNA, 855 bp, Artificial Sequence
  Modified Open Reading Frame
atggtttcgaagggggaggagctgttcaccggcgtggtgcctatcctggtggagctggacggcgacgtgaacggccacaagtttagcgtgtccggcgagggcgaaggcgacgccacctacggcaagctgaccctgaagttcatctgcaccaccggcaaactgcccgtgccctggcccaccttggtgaccaccctgacgtacggagtccagtgcttcagtagataccccgatcacatgaagcagcacgacttcttcaagagtgccatgcccgagggctacgtgcaagaaagaactatcttcttcaaggacgacggaaattacaagaccagagccgaggtgaagttcgagggagacaccctggtgaacagaatcgagctgaagggcatcgacttcaaggaggacggcaacatcttgggccacaaactagagtacaactataacagccataatgtgtacatcatggccgacaagcagaagaacggcattaaggtgaactttaagatcagacacaacatcgaagacggcagcgtgcagctcgccgatcactatcaacagaacacgccgatcggcgacggacccgtgctactgcccgataaccactacctgagcacccagagcgccctgagcaaggaccctaacgagaagcgagatcacatggtgctgctcgagttcgtgaccgccgccggcatcacgctgggcatggacgagttgtacaagcgttctcgcgatatttcccacggcttcccacccgcggtggccgcccaagacgatgggaccctgccaatgagctgcgcccaggagtccggcatggacagacatcccgccgcatgtgctagcgcacgtatcaacgtgtga

SEQ ID NO: 592 - DNA, 855 bp, Artificial Sequence
  Modified Open Reading Frame
atggtttcgaagggggaggagctgttcaccggcgtggtgcctatcctggtggagctggacggcgacgtgaacggccacaagtttagcgtgtccggcgagggcgaaggcgacgccacctacggcaagctgaccctgaagttcatctgcaccaccggcaaactgcccgtgccctggcccaccttggtgaccaccctgacctacggagtccagtgcttcagtagataccccgatcacatgaagcagcacgacttcttcaagagtgccatgcccgagggctacgtgcaagaaagaactatcttcttcaaggacgacggaaactataagaccagagccgaggtgaagttcgagggagacaccctggtgaacagaatcgagctgaagggcatcgacttcaaagaggacggcaacatcttgggccacaaactagagtacaactataacagccataatgtgtacatcatggccgacaagcagaagaacggcattaaggtgaactttaagatcagacacaacatcgaagacggcagcgtgcagctcgccgatcactaccaacagaacacgccgatcggcgacggacccgtgctactgcccgacaaccattacctgagcacccagagcgccctgagcaaggaccctaacgagaagcgagatcacatggtgctgctcgagttcgtgaccgccgccggcatcacgctgggcatggacgagttgtacaagcgttctcgcgatatttcccacggcttcccacccgccgtggccgcccaagacgatgggaccctgccaatgagctgcgcccaggagtccggcatggacagacatcccgccgcatgtgctagtgcacggatcaacgtgtaa

SEQ ID NO: 593 - DNA, 855 bp, Artificial Sequence
  Modified Open Reading Frame
atggtgtcgaagggggaggagctgttcaccggcgtggtgcctatcctggtggagctggacggcgacgtgaacggccacaagtttagcgtgtccggcgagggcgaaggcgacgccacctacggcaagctgaccctgaagttcatctgcaccaccggcaaactgcccgtgccctggcccaccctcgtgaccaccctgacctacggagtccagtgcttcagtagataccccgatcacatgaagcagcacgacttcttcaagagtgccatgcccgagggctacgtgcaggaaagaaccatcttctttaaggacgacggaaactataagaccagagccgaggtgaagttcgagggagacaccctggtgaacagaatcgagctgaagggcatcgacttcaaagaggacggcaacatcctgggccacaaactagagtacaactataacagccataatgtgtacatcatggccgacaagcagaagaacggcattaaggtgaactttaagatcagacacaacatcgaagacggcagcgtgcagctcgccgatcactaccaacagaacacgccgatcggcgacggacccgtgctactgcccgacaaccattacctgagcacccagagcgccctgagcaaggaccctaacgagaagagagatcacatggtgctgctcgagttcgtgaccgccgccggcatcacgctgggcatggacgagttgtacaagcgttctcgcgatatttcccacggctttcctcccgccgtggccgcccaagacgatgggaccctgccaatgagctgcgcccaggagtccggcatggacagacaccccgccgcctgtgcttctgcacggatcaacgtgtaa

SEQ ID NO: 594 - DNA, 855 bp, Artificial Sequence
  Modified Open Reading Frame
atggtgtcgaagggggaggagctgttcaccggcgtggtgcctatcctggtggagctggacggcgacgtgaacggccacaagtttagcgtgtccggcgagggcgaaggcgacgccacctacggcaagctgaccctgaagttcatctgcaccaccggcaaactgcccgtgccctggcccaccctcgtgaccaccctgacctacggagtccagtgcttcagtagataccccgatcacatgaagcagcacgacttcttcaagagtgccatgcccgagggctacgtgcaggaaagaaccatcttctttaaggacgacggaaactataagaccagagccgaggtgaagttcgagggagacaccctggtgaacagaatcgagctgaagggcatcgacttcaaagaggacggcaacatcctgggccacaaactagagtacaattataacagccataatgtgtacatcatggccgacaagcagaagaacggcattaaggtgaactttaagatcagacacaacatcgaagacggcagcgtgcagctcgccgatcactaccagcagaacacgccgatcggcgacggacccgtgctgctgcccgacaaccattacctgagcacccagagcgccctgagcaaggaccctaacgagaagagagatcacatggtgctgctcgagttcgtgaccgccgccggcatcacgctgggcatggacgagttgtacaagcgttctcgcgatatttcccacggctttcctcccgccgtggccgcccaagacgacgggaccctgccaatgagctgcgcccaggagtccggcatggacagacaccccgccgcctgtgcttctgcacggatcaacgtgtaa

SEQ ID NO: 595 - DNA, 855 bp, Artificial Sequence
  Modified Open Reading Frame
atggttagtaagggcgaggagctgttcaccggcgtggtgcctatcctggtggagctggacggcgacgtgaacggccacaagtttagcgtgtccggcgagggcgaaggcgacgccacctacggcaagctgaccctgaagttcatctgcaccaccggcaaactgcccgtgccctggcccaccctcgtgaccaccctgacctacggagtccagtgcttcagtagataccccgatcacatgaagcagcacgacttcttcaagagtgccatgcccgagggctacgtgcaggaaagaaccatcttctttaaggacgacggaaactataagaccagagccgaggtgaagttcgagggagacaccctggtgaacagaatcgagctgaagggcatcgacttcaaagaggacggcaacatcctgggccacaaactagagtacaattataacagccataatgtgtacatcatggccgacaagcagaagaacggcattaaggtgaactttaagatcagacacaacatcgaagacggcagcgtgcagctcgccgatcactaccagcagaacacgccgatcggcgacggacccgtgctgctgcccgacaaccattacctgagcacccagagcgccctgagcaaggaccctaacgagaagagagatcacatggtgctgctcgagttcgtgaccgccgccggcatcacgctgggcatggacgagttgtacaagcgttctcgcgacatcagccacggctttcctcccgccgtggccgcccaagacgacgggaccctgccaatgagctgcgcccaggagtccggcatggacagacaccccgccgcctgtgcttctgcacggatcaacgtgtaa

SEQ ID NO: 596 - DNA, 855 bp, Artificial Sequence
  Modified Open Reading Frame
atggtgtcgaagggggaggagctgttcacgggcgtggtgccgatcctggtggagctggacggcgacgtgaacggccacaagtttagcgtatccggcgagggcgaaggcgatgccacctatggcaagctgaccttgaagttcatctgcactaccggcaagctgcctgtgccctggccaaccctcgtgaccacgctgacttacggagtccagtgcttcagtaggtacccggaccacatgaagcagcacgacttctttaagtcagcgatgcccgaggggtacgtgcaggagaggaccatcttctttaaagacgatggcaactataagacccgagccgaggttaagttcgagggtgacaccctcgtcaaccgaatcgagctcaagggcatcgactttaaagaggatggtaacatcctgggccacaagctggagtacaactacaacagccacaacgtgtacatcatggccgacaagcagaagaacggtatcaaggtgaactttaagatcagacacaatatcgaggacggcagcgtgcagctcgccgatcactaccagcagaacacgccgatcggcgacggccccgtgctgctgcccgataaccattacctgagcactcagagcgctctgtccaaggaccctaacgaaaagagggatcacatggtgctcctcgagttcgttaccgctgccggcatcaccctgggcatggacgagctctacaagaggtcccgcgacatcagccacggctttcctccagccgtggctgcgcaggacgacgggacccttcccatgagctgtgcccaggagtccggcatggacagacaccccgccgcctgtgccagcgccaggatcaacgtttaa

SEQ ID NO: 597 - DNA, 855 bp, Artificial Sequence
  Modified Open Reading Frame
atggtgtccaagggcgaggagctgtttactggggttgtgcccatattggttgagcttgatggtgatgtcaatggacataaatttagcgtaagcggtgagggcgaaggggatgctacgtatggaaagcttacacttaagttcatatgtaccacggggaagttgccagtgccatggcccaccctggtgactaccctgacctatggcgttcagtgcttcagcagatatcccgatcacatgaaacagcatgactttttcaagagtgccatgcccgagggttacgttcaagaacgaaccatcttcttcaaagacgacggcaactataagactcgtgccgaagtcaaatttgagggcgacactctggtcaatcgtatcgagttgaaagggattgatttcaaagaagacggcaacatattggggcacaaactcgagtacaactacaactcacataatgtgtacataatggcagacaagcagaagaatgggatcaaggtcaacttcaagattaggcacaatattgaggacggatcggtgcagctggcagatcactaccagcagaatacaccgataggcgacgggccagtgttgttgccagacaatcattacctgtcgactcagtccgccctcagtaaggatcctaacgagaagcgcgaccacatggttcttctggagtttgtcaccgccgctggtataacacttgggatggacgaactgtataagcgctcgcgtgacatctcccatgggtttccaccggcagttgccgcgcaagacgatggcacactcccgatgagctgtgcgcaagaatctggcatggatcgccatcctgctgcctgcgctagtgcacgcattaatgtgtaa

SEQ ID NO: 598 - DNA, 855 bp, Artificial Sequence
  Modified Open Reading Frame
atggtatcaaaaggagaagagttgttcaccggggttgtgcccatacttgttgaactcgacggtgacgtcaatgggcacaagtttagcgtttccggtgagggagagggagatgcgacttacggaaagctaactctcaagttcatctgcaccaccggtaaacttcctgtgccctggcccacactcgtcacgactctcacttatggagtgcagtgcttcagtcggtacccagaccacatgaaacagcacgacttcttcaaaagtgcgatgcctgaggggtatgtgcaagagcgaactattttttttaaggacgatggaaactacaaaactcgcgcagaggtgaagtttgaaggtgacaccctcgttaacagaatagagcttaaaggcattgacttcaaagaggacggcaacatacttgggcacaaactcgagtacaactataacagccataacgtgtacatcatggccgataagcagaagaacggtatcaaggtcaacttcaagatacggcacaatatcgaagacggcagtgttcagcttgctgatcactatcagcagaacacgccgattggagatggtcccgtacttttgcctgacaaccattacttaagcacgcagagcgcactatctaaagacccgaacgaaaagagagatcatatggttcttcttgagttcgtgaccgctgcgggcataactcttggtatggacgaactgtacaagagatcgcgagatatcagtcatggctttccgccagcagtggcggcacaggatgacggaactctcccgatgtcttgtgcacaagagtccggcatggaccgtcatcctgctgcttgtgcctctgcacgtattaatgtctga

SEQ ID NO: 599 - DNA, 855 bp, Artificial Sequence
  Modified Open Reading Frame
atggtatcaaaaggagaggagctgtttactggggttgtgcccatattggttgagcttgatggtgatgtcaatggacataaatttagcgtaagcggtgagggcgaaggggatgctacgtatggaaagcttacacttaagttcatatgtaccacggggaagttgccagtgccatggcccaccctggtgactaccctgacctatggcgttcagtgcttcagcagatatcccgatcacatgaaacagcatgactttttcaagagtgccatgcccgagggttacgttcaagaacgaaccatcttcttcaaagacgacggcaactataagactcgtgccgaagtcaaatttgagggcgacactctggtcaatcgtatcgagttgaaagggattgatttcaaagaagacggcaacatattggggcacaaactcgagtacaactacaactcacataatgtgtacataatggcagacaagcagaagaatgggatcaaggtcaacttcaagattaggcacaatattgaggacggatcggtgcagctggcagatcactaccagcagaatacaccgataggcgacgggccagtgttgttgccagacaatcattacctgtcgactcagtccgccctcagtaaggatcctaacgagaagcgcgaccacatggttcttctggagtttgtcaccgccgctggtataacacttgggatggacgaactgtataagcgctcgcgtgacatctcccatgggtttccaccggcagttgccgcgcaagacgatggcacactcccgatgagctgtgcgcaagaatctggcatggatcgccatcctgctgcctgcgctagtgcacgcattaatgtgtaa

SEQ ID NO: 600 - DNA, 855 bp, Artificial Sequence
  Modified Open Reading Frame
atggtttctaaaggcgaggagctgttcaccggtgtggtgcctattctggtggagctggacggcgacgtgaacggacacaagttctcggtgagtggcgaaggtgaaggtgacgccacgtacgggaagcttaccctgaaattcatctgtaccacgggtaagcttcccgtgccgtggcccaccttggtgaccactctgacttacggcgtgcagtgcttcagtcggtaccccgaccacatgaagcagcacgacttcttcaagtctgccatgcctgaaggatatgtccaggaaaggaccatattcttcaaggacgatggcaattataagacgcgtgcggaagtcaagtttgaaggcgatacccttgtcaatagaattgagctcaagggtatcgacttcaaagaggacggtaatatactcgggcacaagctcgagtataattacaattcccacaacgtctatataatggccgataagcagaagaatggcatcaaggtcaacttcaagattcgccacaacatcgaggacgggtccgttcagctcgccgaccactaccagcagaatacacccatcggtgacggccccgtattgttgcccgacaatcattatcttagcacgcagtcagcgctgtcgaaggacccgaatgagaagcgcgaccatatggttcttctagagttcgtcactgccgcagggatcaccctcggcatggacgagctctacaagcgtagtcgcgacatctcacacgggttcccgccagcggtggctgcgcaagatgatgggacgttgccgatgagctgcgcgcaggagtccggcatggatagacatcctgccgcctgcgccagcgctcggatcaacgtctaa

SEQ ID NO: 601 - DNA, 855 bp, Artificial Sequence
  Modified Open Reading Frame
atggtttctaaaggcgaggaactgttcaccggtgtggtgcctattctggtggagctggacggcgacgtgaacggacacaagttctcggtgagtggcgaaggtgaaggtgacgccacgtacgggaagcttaccctgaaattcatctgtaccacgggtaagcttcccgtgccgtggcccaccttggtgaccactctgacttacggcgtgcagtgcttcagtcggtaccccgaccacatgaagcagcacgacttcttcaagtctgccatgcctgaaggatatgtccaggaaaggaccatattcttcaaggacgatggcaattataagacgcgtgcggaagtcaagtttgaaggcgatacccttgtcaatagaattgagctcaagggtatcgacttcaaagaggacggtaatatactcgggcacaagctcgagtataattacaattcccacaacgtctatataatggccgataagcagaagaatggcatcaaggtcaacttcaagattcgccacaacatcgaggacgggtccgttcagctcgccgaccactaccagcagaatacacccatcggtgacggtcccgtattgttgcccgacaatcattatcttagcacgcagtcagcgctgtcgaaggacccgaatgagaagcgcgaccatatggttcttctagagttcgtcactgccgcagggatcaccctcggcatggacgagctctacaagcgtagtcgcgacatctcacacgggttcccgccagcggtggctgcgcaagatgatgggacgttgccgatgagctgcgcgcaggagtccggcatggatagacatcctgccgcctgcgccagcgctcggatcaacgtctaa

SEQ ID NO: 602 - DNA, 855 bp, Artificial Sequence
  Modified Open Reading Frame
atggtttctaaaggtgaggagctgttcaccggtgtggtgcctattctggtggagctggacggcgacgtgaacggacacaagttctcggtgagtggcgaaggtgaaggtgacgccacgtacgggaagcttaccctgaaattcatctgtaccacgggtaagcttcccgtgccgtggcccaccttggtgaccactctgacttacggcgtgcagtgcttcagtcggtaccccgaccacatgaagcagcacgacttcttcaagtctgccatgcctgaaggatatgtccaggaaaggaccatattcttcaaggacgatggcaattataagacgcgtgcggaagtcaagtttgaaggcgatacccttgtcaatagaattgagctcaagggtatcgacttcaaagaggacggtaatatactcgggcacaagctcgagtataattacaattcccacaacgtctatataatggccgataagcagaagaatggcatcaaggtcaacttcaagattcgccacaacatcgaggacgggtccgttcagctcgccgaccactaccagcagaatacacccatcggtgacggccctgtattgttgcccgacaatcattatcttagcacgcagtcagcgctgtcgaaggacccgaatgagaagcgcgaccatatggttcttctagagttcgtcactgccgcagggatcaccctcggcatggacgagctctacaagcgtagtcgcgacatctcacacgggttcccgccagcggtggctgcgcaagatgatgggacgttgccgatgagctgcgcgcaggagtccggcatggatagacatcctgccgcctgcgccagcgctcggatcaacgtctaa

SEQ ID NO: 603 - DNA, 855 bp, Artificial Sequence
  Modified Open Reading Frame
atggtatcaaaaggagaagagctgtttactggggttgtgcccatattggttgagcttgatggtgatgtcaatggacataaatttagcgtaagcggtgagggcgaaggggatgctacgtatggaaagcttacacttaagttcatatgtaccacggggaagttgccagtgccatggcccaccctggtgactaccctgacctatggcgttcagtgcttcagcagatatcccgatcacatgaaacagcatgactttttcaagagtgccatgcccgagggttacgttcaagaacgaaccatcttcttcaaagacgacggcaactataagactcgtgccgaagtcaaatttgagggcgacactctggtcaatcgtatcgagttgaaagggattgatttcaaagaagacggcaacatattggggcacaaactcgagtacaactacaacagccataatgtgtacataatggcagacaagcagaagaatgggatcaaggtcaacttcaagattaggcacaatattgaggacggatcggtgcagctggcagatcactaccagcagaatacaccgataggcgacgggccagtgttgttgccagacaatcattacctgtcgactcagtccgccctcagtaaggatcctaacgagaagcgcgaccacatggttcttctggagtttgtcaccgccgctggtataacacttgggatggacgaactgtataagcgctcgcgtgacatctcccatgggtttccaccggcagttgccgcgcaagacgatggcacactcccgatgagctgtgcgcaagaatctggcatggatcgccatcctgctgcctgcgctagtgcacgcattaacgtttaa

SEQ ID NO: 604 - DNA, 855 bp, Artificial Sequence
  Modified Open Reading Frame
atggtgtcgaagggggaggagctgttcacgggcgtggtgccgatcctggtggagctggacggcgacgtgaacggccacaagtttagcgtatccggcgagggcgaaggcgacgccacctatggcaagctgaccttgaagttcatctgcaccaccggcaaactgcccgtgccctggcccaccctcgtgaccacgctgacttacggagtccagtgcttcagcagataccccgaccacatgaagcagcacgacttctttaagtcagcgatgcccgagggctacgtgcaggaaagaaccatcttctttaaagacgatggaaactataagaccagagccgaggtgaagttcgagggtgacaccctcgtgaacagaatcgagctgaagggcatcgacttcaaagaggatggcaacatcctgggccacaagctggagtacaactacaacagccacaacgtgtacatcatggccgacaaacagaagaacgggatcaaggtgaactttaagatcagacacaacatcgaggacggcagcgtgcagctcgccgatcactaccagcagaacactccgatcggcgacggccccgtgctgctgcccgacaaccattacctgagcactcagagcgctctgtccaaggaccctaacgaaaagagggatcacatggtgctcctcgagttcgttaccgctgccggcatcaccctgggcatggacgagctctacaagaggtcccgcgacatcagccacggctttcctccagccgtggctgcgcaggacgacgggacccttcccatgagctgcgcccaggagtccggcatggacagacaccccgccgcctgtgccagcgccaggatcaacgtgtaa

SEQ ID NO: 605 - DNA, 855 bp, Artificial Sequence
  Modified Open Reading Frame
atggtgagcaaaggggaggaactgtttacaggcgtggtaccaatcttggtagaacttgatggtgatgttaatggccacaagttctccgttagcggcgagggtgagggtgacgcgacgtacggtaaacttactcttaagtttatctgtacgactggtaaactgccggtcccgtggcctactcttgtaacgacgctgacgtatggcgtccagtgtttcagtcggtaccctgaccacatgaagcagcacgatttcttcaagtctgctatgcctgaggggtacgtccaggagcgtactatcttctttaaggacgatggcaattacaagactcgtgccgaggtcaagtttgagggtgatacgcttgtgaatcgcattgagcttaaaggtattgactttaaagaggatggtaacatcttgggtcataagctagagtataattacaatagccataatgtatatattatggcagataagcagaagaatggcataaaggtgaattttaaaattcgccataatattgaagatgggagtgttcagttggcggaccactatcagcagaatactcctatcggcgatggcccggtgttgttacctgataaccattatctgagtacgcagagtgcgcttagtaaagatcctaatgagaagagggatcacatggtgttgttagagtttgtgacagcagccgggatcacgttaggtatggatgagctatacaagcggagtcgtgatatcagtcatggctttccgccggcggtggcggcgcaggatgatggtactttaccgatgtcttgtgctcaggagagcggtatggatcgtcatcctgctgcctgcgcctccgcgcgtataaacgtttag

SEQ ID NO: 606 - DNA, 855 bp, Artificial Sequence
  Modified Open Reading Frame
atggtgagcaaaggggaggaactgtttacaggcgtggtaccaatcttggtagaacttgatggcgatgttaatggccacaagttctccgtcagcggcgagggtgagggcgacgcgacgtacggtaaacttactcttaagtttatctgtacgactggtaaactaccagtcccgtggcccaccctcgtaacgacgctgacgtatggcgtccagtgcttcagtcggtaccccgaccacatgaagcagcacgacttcttcaagtctgctatgcctgaggggtacgtccaggagcgtaccatcttctttaaagacgatggcaactacaagacccgtgccgaggtcaagttcgagggtgacacccttgtcaaccgcatcgaacttaaaggcatcgactttaaagaagatggtaacatcctgggccataagctagagtataattacaatagccataatgtatatattatggcagataagcagaagaatggcataaaggtgaattttaaaattcgccataacatcgaagatgggagtgttcagttggcggaccactaccaacagaacactcccatcggcgatggcccggtgctgttacctgacaaccactatctgagcacgcagagcgcgctcagtaaagatcccaatgagaagagggatcacatggtgttgttagagtttgtgacagcagccgggatcacgctgggcatggacgagctatacaagcggagccgtgacatcagtcacggctttccgccggcggtggcggcgcaggatgacggtaccttaccgatgtcttgtgctcaagagagcggtatggaccgtcatcccgccgcctgcgcctccgcgcgtataaacgtttag

SEQ ID NO: 607 - DNA, 855 bp, Artificial Sequence
  Modified Open Reading Frame
atggtatcaaaaggtgaggaattgtttactggcgtagtccctatcctcgttgaactggacggtgacgttaatggacacaaattttctgtctctggcgagggagaaggcgatgctacttatgggaaactgactctaaaattcatctgcacgacaggcaaattgcctgtcccatggcctacgctcgtgaccacgttaacgtatggagtgcagtgcttcagcaggtatccagatcacatgaaacaacatgacttctttaaatcggccatgcccgaagggtatgtgcaggagcgaacaatcttctttaaagatgacggcaactacaagacaagggctgaagttaagtttgagggagatacgctagtcaaccgcatagaattgaagggtatcgattttaaggaagacgggaacatactgggccataagcttgagtacaattataactcacacaacgtctacattatggcggataagcaaaagaatggaatcaaggtaaacttcaaaatacgacacaatattgaagacggatccgtgcagctagcagatcactaccagcagaatactcccatcggtgacgggccagtacttctgcccgacaaccattacttatccacccagtccgcactctcgaaggatcctaatgagaaacgagatcacatggtcctcttggaatttgttactgcagcaggcatcactctaggaatggatgagttgtacaaacggagtagagatatcagccatggcttcccaccagcagttgccgcgcaagatgacggaactttgccaatgtcctgtgcacaggaatcagggatggatagacaccccgcggcctgcgccagcgcacgtataaatgtctaa

SEQ ID NO: 608 - DNA, 855 bp, Artificial Sequence
  Modified Open Reading Frame
atggtatcaaaaggtgaggaattgtttactggcgtagtccctatcctcgttgaactggacggtgacgttaatggacacaaattttctgtctctggcgagggagaaggcgatgctacttatgggaaactgactctaaaattcatctgcacgacaggcaaattgcctgtcccatggcctacgctcgtgaccacgttaacgtatggagtgcagtgcttcagcaggtatccagatcacatgaaacaacatgacttctttaaatcggctatgcccgaagggtatgtgcaggagcgaacaatcttctttaaagatgacggcaactacaagacaagggctgaagttaagtttgagggagatacgctagtcaaccgcatagaattgaagggtatagattttaaggaagacgggaacatactgggccataagcttgagtacaattataactcacacaacgtctacattatggcggataagcaaaagaatggaatcaaggtaaacttcaaaatacgacacaatattgaagacggatccgtgcagctagcagatcactaccagcagaatactcccatcggtgacgggccagtacttctgcccgacaaccattacttatccacccagtccgcactctcgaaggatcctaatgagaaacgagatcacatggtcctcttggaatttgttactgcagcaggcatcactctaggaatggatgagttgtacaaacggagtagagatatcagccatggcttcccaccagcagttgccgcgcaagatgacggaactttgccaatgtcctgtgcacaggaatcagggatggatagacaccccgcggcctgcgccagcgcacgtataaatgtctaa

SEQ ID NO: 609 - DNA, 855 bp, Artificial Sequence
  Modified Open Reading Frame
atggtgtccaagggcgaggagctgtttaccggcgtggtgcccatcctggtggagctggacggcgacgtgaacgggcacaagtttagcgtgtccggcgagggtgagggtgatgccacctatggcaaactcaccctaaaatttatatgcaccaccgggaaactgcccgtgccctggcccactctcgtcacgacgctgacttacggagtccagtgcttcagcaggtaccccgaccatatgaagcagcatgacttctttaagtcagccatgcccgagggttacgtccaggagcggaccattttctttaaagacgacggcaattacaagacgagagccgaggtgaagttcgagggagacaccctggtgaacagaatcgagctgaagggcatcgacttcaaagaggatggcaatatcctgggccacaaacttgagtataattataatagccataatgtgtacattatggcggacaagcagaagaatgggatcaaggtgaacttcaaaatcaggcataatatcgaggacggcagcgtgcaactcgccgatcattatcaacaaaatacaccgatcggcgacgggccagtgctgctgcccgataatcattacctgagtacgcagagcgccttgtccaaggacccgaacgagaagagagatcatatggtgctgctcgagtttgtgaccgccgccggcatcaccctgggcatggacgagctgtacaaacgatcccgcgatatcagccacggcttcccgccagccgtggccgcgcaggacgacgggacgctgcccatgagctgcgctcaagagtccggcatggacagacatcccgccgcctgtgccagcgcgaggatcaatgtgtaa

SEQ ID NO: 610 - DNA, 855 bp, Artificial Sequence
  Modified Open Reading Frame
atggtatcaaaaggtgaggaattgtttactggcgtagtccctatcctcgttgaactggacggtgacgttaatggacacaaattttctgtctctggcgagggagaaggcgatgctacttatgggaaacttactctaaaattcatatgcacgacaggcaaattgcctgtcccatggcctacgctcgtgaccacgttaacgtatggagtgcagtgcttcagcaggtatccagatcacatgaaacaacatgacttctttaaatcggctatgcccgaagggtatgtgcaggagcgaacaatcttctttaaagatgacggcaactacaagacaagggctgaagttaagtttgagggagatacgctagtcaaccgcatagaattgaagggtatagattttaaggaagacgggaacatactgggccataagcttgagtacaattataactcacacaacgtctacattatggcggataagcaaaagaatggaatcaaggtaaacttcaaaatacgacacaatattgaagacggatccgtgcagctagcagatcactaccagcagaatactcccatcggtgacgggccagtacttctgcccgacaaccattacttatccacccagtccgcactctcgaaggatcctaatgagaaacgagatcacatggtcctcttggaatttgttactgcagcaggcatcactctaggaatggatgagttgtacaaacggagtagagatatcagccatggcttcccaccagcagttgccgcgcaagatgacggaactttgccaatgtcctgtgcacaggaatcagggatggatagacaccccgcggcctgcgccagcgcacgtataaatgtctaa

SEQ ID NO: 611 - DNA, 855 bp, Artificial Sequence
  Modified Open Reading Frame
atggtgtccaagggcgaggagctgtttaccggcgtggtgcccatcctggtggagctggacggcgacgtgaacgggcacaagtttagcgtgtccggcgagggtgagggtgatgccacctatggcaaactcaccctaaaatttatatgcaccaccgggaaactgcccgtgccctggcccactctcgtcacgacgctgacttacggagtccagtgcttcagcaggtaccccgaccatatgaagcagcatgacttctttaagtcagccatgcccgagggttacgtccaggagaggaccattttctttaaagacgacggcaattacaagacgagagccgaggtgaagttcgagggagacaccctggtgaacagaatcgagctgaagggcatcgacttcaaagaggatggcaatatcctgggccacaaacttgagtacaactacaacagccataatgtgtacattatggcggacaagcagaagaatgggatcaaggtgaacttcaaaatcaggcataatatcgaggacggcagcgtgcaactcgccgatcactaccaacaaaacacgccgatcggcgacgggccagtgctgctgcccgataatcattacctgagtacgcagagcgccttgtccaaggacccgaacgagaagagagatcatatggtgctgctcgagtttgtgaccgccgccggcatcaccctgggcatggacgagctgtacaaacgatcccgcgatatcagccacggcttcccgccagccgtggccgcgcaggacgacgggacgctgcccatgagctgcgctcaagagtccggcatggacagacatcccgccgcctgtgccagcgcgaggatcaatgtgtaa

SEQ ID NO: 612 - DNA, 855 bp, Artificial Sequence
  Modified Open Reading Frame
atggtatcaaaaggtgaggaattgtttactggcgtagtccctatcctcgttgaactggacggtgacgttaatggacacaaattttctgtctctggcgaaggagaaggcgatgctacttatgggaaacttactctaaaattcatatgcacgacaggcaaattgcctgtcccatggcctacgctcgtgaccacgttaacgtatggagtgcagtgcttcagcaggtatccagatcacatgaaacaacatgacttctttaaatcggctatgcccgaagggtatgtgcaggagcgaacaatcttctttaaagatgacggcaactacaagacaagggctgaagttaagtttgagggagatacgctagtcaaccgcatagaattgaagggtatagattttaaggaagacgggaacatactgggccataagcttgagtacaattataactcacacaacgtctacattatggcggataagcaaaagaatggaatcaaggtaaacttcaaaatacgacacaatattgaagacggatccgtgcagctagcagatcactaccagcagaatactcccatcggtgacgggccagtacttctgcccgacaaccattacttatccacccagtccgcactctcgaaggatcctaatgagaaacgagatcacatggtcctcttggaatttgttactgcagcaggcatcactctaggaatggatgagttgtacaaacggagtagagatatcagccatggcttcccaccagcagttgcagcgcaagatgacggaactttgccaatgtcctgtgcacaggaatcagggatggatagacaccccgcggcctgcgccagcgcacgtataaatgtctaa

SEQ ID NO: 613 - DNA, 855 bp, Artificial Sequence
  Modified Open Reading Frame
atggtgtccaagggcgaggagctgtttaccggcgtggtgcctatcctggtggagctggacggcgacgtgaacgggcacaagtttagcgtgtccggcgagggtgagggtgatgccacctatggcaagctcaccctaaaatttatatgcaccaccgggaaactgcccgtgccctggcccaccctcgtcacgacgctgacttacggagtccagtgcttcagcaggtaccccgaccatatgaagcagcatgacttctttaagtcagccatgcccgagggttacgtccaggagaggaccatcttctttaaagacgacggcaattacaagacgagagccgaggtgaagttcgagggagacaccctggtgaacagaatcgagctgaagggcatcgacttcaaagaggatggcaatatcctgggccacaaacttgagtacaactacaacagccataatgtgtacattatggcggacaagcagaagaatgggatcaaggtgaacttcaaaatcaggcataatatcgaggacggcagcgtgcagctcgccgatcactaccaacaaaacacgccgatcggcgacgggccagtgctgctgcccgataatcattacctgagtacgcagagcgccttgtccaaggacccgaacgagaagagagatcatatggtgctgctcgagtttgtgaccgccgccggcatcaccctgggcatggacgagctgtacaaacgatcccgcgatatcagccacggcttcccgccagccgtggccgcgcaggacgacgggacgctgcccatgagctgcgctcaagagtccggcatggacagacatcccgccgcctgtgccagcgcgaggatcaatgtgtaa

SEQ ID NO: 614 - DNA, 855 bp, Artificial Sequence
  Modified Open Reading Frame
atggtgtccaagggcgaggagctgtttaccggcgtggtgcctatcctggtggagctggacggcgacgtgaacgggcacaagtttagcgtgtccggcgagggtgagggtgatgccacctatggcaagctcaccctaaaatttatatgcaccaccgggaaactgcccgtgccctggcccaccctcgtcacgacgctgacttacggagtccagtgcttcagcaggtaccccgaccatatgaagcagcatgacttctttaagtcagccatgcccgagggttacgtccaggagaggaccatcttctttaaagacgacggcaattacaagacgagagccgaggtgaagttcgagggagacaccctggtgaacagaatcgagctgaagggcatcgacttcaaagaggatggcaatatcctgggccacaaacttgagtacaactacaacagccataatgtgtacattatggccgacaagcagaagaatgggatcaaggtgaacttcaaaatcaggcataatatcgaggacggcagcgtgcaactcgccgatcattatcaacaaaatacaccgatcggcgatgggccagtgctgctgcccgataatcattacctgagtacgcagagcgccctgtccaaggacccgaacgagaagagagatcatatggtgctgctcgagtttgtgaccgccgccggcatcaccctgggcatggacgagctgtacaaacgatcccgcgatatcagccacggcttcccgccagccgtggccgcgcaggacgacgggacgctgcccatgagctgcgctcaagagtccggcatggacagacatcccgccgcctgtgccagcgcgaggatcaatgtgtaa

SEQ ID NO: 615 - DNA, 855 bp, Artificial Sequence
  Modified Open Reading Frame
atggtgtccaagggcgaggagctgtttaccggcgtggtgcctatcctggtggagctggacggcgacgtgaacgggcacaagtttagcgtgtccggcgagggtgagggtgatgccacctatggcaagctcaccctaaaatttatatgcaccaccgggaaactgcccgtgccctggcccaccctcgtcacgacgctgacttacggagtccagtgcttcagcaggtaccccgaccatatgaagcagcatgacttctttaagtcagccatgcccgagggttacgtccaggagaggaccatcttctttaaagacgacggcaattacaagacgagagccgaggtgaagttcgagggagacaccctggtgaacagaatcgagctgaagggcatcgacttcaaagaggatggcaatatcctgggccacaaacttgagtacaattacaacagccataatgtgtacattatggccgacaaacaaaaaaatgggatcaaggtgaacttcaaaatcaggcataatatcgaggacggcagcgtgcaactcgccgatcattatcaacaaaatacaccgatcggcgatgggccagtgctgctgcccgataatcattacctgagtacgcagagcgccctgtccaaggacccgaacgagaagagagatcatatggtgctgctcgagtttgtgaccgccgccggcatcaccctgggcatggacgagctgtacaaacgatcccgcgatatcagccacggcttcccgccagccgtggccgcgcaggacgacgggacgctgcccatgagctgcgctcaagagtccggcatggacagacatcccgccgcctgtgccagcgcgaggatcaatgtgtaa

SEQ ID NO: 616 - DNA, 855 bp, Artificial Sequence
  Modified Open Reading Frame
atggtgtccaagggcgaggagctgtttaccggcgtggtgcctatcctggtggagctggacggcgacgtgaacgggcacaagtttagcgtgtccggcgagggtgagggtgatgccacctatggcaagctcaccctgaagtttatatgcaccaccgggaaactgcccgtgccctggcccaccctcgtcacgacgctgacttacggagtccagtgcttcagcaggtaccccgaccacatgaagcagcatgacttctttaagtcagccatgcccgagggttacgtccaggagaggaccatcttctttaaagacgacggcaattacaagaccagagccgaggtgaagttcgagggagacaccctggtgaacagaatcgagctgaagggcatcgacttcaaagaggatggcaatatcctgggccacaaacttgagtacaattacaacagccataatgtgtacattatggccgacaaacaaaaaaatgggatcaaggtgaacttcaaaatcaggcataatatcgaggacggcagcgtgcagctcgccgaccattatcaacaaaataccccgatcggcgacggacccgtgctgctgcccgataatcattacctgagtacgcagagcgccctgtccaaggacccgaacgagaagagagatcatatggtgctgctcgagtttgtgaccgccgccggcatcaccctgggcatggacgagctgtacaagcgatcccgcgatatcagccacggcttcccgccagccgtggccgcgcaggacgacgggacgctgcccatgagctgcgctcaagagtccggcatggacagacatcccgccgcctgtgccagcgcgaggatcaacgtgtaa

SEQ ID NO: 617 - DNA, 855 bp, Artificial Sequence
  Modified Open Reading Frame
atggtgtccaagggcgaggagctgtttaccggcgtggtgcctatcctggtggagctggacggcgacgtgaacgggcacaagtttagcgtgtccggcgagggtgagggtgatgccacctatggcaagctcaccctgaagtttatatgcaccaccgggaaactgcccgtgccctggcccaccctcgtcacgacgctgacttacggagtccagtgcttcagcaggtaccccgaccacatgaagcagcatgacttctttaagtcagccatgcccgagggttacgtccaggagaggaccatcttctttaaagacgacggcaattacaagaccagagccgaggtgaagttcgagggagacaccctggtgaacagaatcgagctgaagggcatcgacttcaaagaggatggcaatatcctgggccacaaacttgagtacaattacaacagccataatgtgtacattatggccgacaaacaaaaaaatgggatcaaggtgaactttaagatcagacacaacatcgaggacggcagcgtgcagctcgccgaccattatcaacaaaataccccgatcggcgacggacccgtgctgctgcccgacaaccattacctgagcacccagagcgccctgtccaaggacccgaacgagaagagagatcatatggtgctgctcgagtttgtgaccgccgccggcatcaccctgggcatggacgagctgtacaagcgatcccgcgatatcagccacggcttcccgccagccgtggccgcgcaggacgacgggacgctgcccatgagctgcgctcaagagtccggcatggacagacatcccgccgcctgtgccagcgcgaggatcaacgtgtaa

SEQ ID NO: 618 - DNA, 855 bp, Artificial Sequence
  Modified Open Reading Frame
atggtgtccaagggcgaggagctgtttaccggcgtggtgcctatcctggtggagctggacggcgacgtgaacgggcacaagtttagcgtgtccggcgagggtgagggtgatgccacctatggcaagctcaccctgaagtttatatgcaccaccgggaaactgcccgtgccctggcccaccctcgtcacgacgctgacttacggagtccagtgcttcagcaggtaccccgaccacatgaagcagcatgacttctttaagtcagccatgcccgagggttacgtccaggagaggaccatcttctttaaagacgacggcaattacaagaccagagccgaggtgaagttcgagggagacaccctggtgaacagaatcgagctgaagggcatcgacttcaaagaggatggcaatatcctgggccacaaacttgagtacaattacaacagccataatgtgtacattatggccgacaaacaaaaaaatgggatcaaggtgaactttaagatcagacacaacatcgaggacggcagcgtgcagctcgccgaccattatcaacaaaataccccgatcggcgacggacccgtgctgctgcccgacaaccattacctgagcacccagagcgccctgtccaaggacccgaacgagaagagagatcatatggtgctgctcgagtttgtgaccgccgccggcatcaccctgggcatggacgagctgtacaagcgatcccgcgatatcagccacggcttcccgccagccgtggccgcgcaggacgacgggacgctgcccatgagctgcgctcaagagtccggcatggacagacaccccgccgcctgtgccagcgcgaggatcaacgtgtaa

SEQ ID NO: 619 - DNA, 855 bp, Artificial Sequence
  Modified Open Reading Frame
atggtgtccaagggcgaggagctgtttaccggcgtggtgcctatcctggtggagctggacggcgacgtgaacgggcacaagtttagcgtgtccggcgagggtgagggtgatgccacctatggcaagctcaccctgaagtttatatgcaccaccgggaaactgcccgtgccctggcccaccctcgtcacgacgctgacttacggagtccagtgcttcagcaggtaccccgaccacatgaagcagcatgacttctttaagtcagccatgcccgagggttacgtccaggagaggaccatcttctttaaagacgacggcaactacaagacgagagccgaggtgaagttcgagggagacaccctggtgaacagaatcgagctgaagggcatcgacttcaaagaggatggcaatatcctgggccacaaacttgagtacaattacaacagccacaatgtgtacatcatggccgacaaacaaaaaaatgggatcaaggtgaactttaagatcagacacaacatcgaggacggcagcgtgcagctcgccgaccattatcaacaaaataccccgatcggcgacggacccgtgctgctgcccgacaaccattacctgagcacccagagcgccctgtccaaggacccgaacgagaagagagatcatatggtgctgctcgagtttgtgaccgccgccggcatcaccctgggcatggacgagctgtacaagcgatcccgcgatatcagccacggcttcccgccagccgtggccgcgcaggacgacgggacgctgcccatgagctgcgctcaagagtccggcatggacagacaccccgccgcctgtgccagcgcgaggatcaacgtgtaa

SEQ ID NO: 620 - DNA, 855 bp, Artificial Sequence
  Modified Open Reading Frame
atggtgtccaagggcgaggagctgtttaccggcgtggtgcctatcctggtggagctggacggcgacgtgaacgggcacaagtttagcgtgtccggcgagggtgagggtgatgccacctatggcaagctcaccctgaagtttatatgcaccaccgggaaactgcccgtgccctggcccaccctcgtcacgacgctgacttacggagtccagtgcttcagcaggtaccccgaccacatgaagcagcatgacttctttaagtccgccatgcccgagggttacgtccaggagaggaccatcttctttaaagacgacggcaactacaagacgagagccgaggtgaagttcgagggagacaccctggtgaacagaatcgagctgaagggcatcgacttcaaagaggatggcaatatcctgggccacaaacttgagtacaattacaacagccacaatgtgtacatcatggccgacaaacaaaaaaatgggatcaaggtgaactttaagatcagacacaacatcgaggacggcagcgtgcagctcgccgaccattatcaacaaaataccccgatcggcgacggacccgtgctgctgcccgacaaccattacctgagcacccagagcgccctgtccaaggacccgaacgagaagagagatcatatggtgctgctcgagtttgtgaccgccgccggcatcaccctgggcatggacgagctgtacaagcgatcccgcgatatcagccacggcttcccgccagccgtggccgcgcaggacgacgggacgctgcccatgagctgcgctcaagagtccggcatggacagacaccccgccgcctgtgccagcgcgaggatcaacgtgtaa

SEQ ID NO: 621 - DNA, 855 bp, Artificial Sequence
  Modified Open Reading Frame
atggtgtccaagggcgaggagctgtttaccggcgtggtgcctatcctggtggagctggacggcgacgtgaacgggcacaagtttagcgtgtccggcgagggtgagggtgacgccacctatggcaagctcaccctgaagtttatatgcaccaccgggaaactgcccgtgccctggcccaccctcgtgacgacgctgacttacggagtccagtgcttcagcaggtaccccgaccacatgaagcagcatgacttctttaagtccgccatgcccgagggttacgtccaggagaggaccatcttctttaaagacgacggcaactacaagacgagagccgaggtgaagttcgagggagacaccctggtgaacagaatcgagctgaagggcatcgacttcaaagaggatggcaatatcctgggccacaaacttgagtacaattacaacagccacaatgtgtacatcatggccgacaaacaaaaaaatgggatcaaggtgaactttaagatcagacacaacatcgaggacggcagcgtgcagctcgccgaccattatcaacaaaataccccgatcggcgacggacccgtgctgctgcccgacaaccattacctgagcacccagagcgccctgtccaaggacccgaacgagaagagagatcatatggtgctgctcgagtttgtgaccgccgccggcatcaccctgggcatggacgagctgtacaagcgatcccgcgatatcagccacggcttcccgccagccgtggccgcgcaggacgacgggacgctgcccatgagctgcgctcaagagtccggcatggacagacaccccgccgcctgtgccagcgcgaggatcaacgtgtaa

SEQ ID NO: 622 - DNA, 855 bp, Artificial Sequence
  Modified Open Reading Frame
atggtgtctaaaggagaagaattatttaccggcgttgtccctatactggtggagctcgacggggacgtcaacggacacaagttctcagtttctggtgaaggtgagggagacgcaacttatggtaagttgactcttaaattcatctgtaccacagggaagttaccggtgccttggccaacgctagtcacaactctaacatacggagtgcagtgtttctctcgctatccggaccatatgaagcagcatgacttctttaagagtgctatgcccgaaggatacgtacaagaacgtacgatattcttcaaggacgatgggaattacaagacccgagctgaagtaaagttcgaaggtgatacacttgtgaatcgcatcgaacttaagggcatagactttaaagaggatgggaacattttgggccacaagcttgaatataattacaactcccacaatgtttatatcatggcagataaacaaaaaaatggtatcaaggtgaattttaagatccgccacaatattgaggacggatctgtgcagctggccgatcactatcagcagaacactccgatcggtgacggaccagtgcttttacctgataaccattatctgtcaacacagtcagcgctttctaaggatccgaacgagaagcgagaccacatggtactcctagagttcgtgacggctgccggaattaccctgggtatggatgagctttataaacggagtcgcgatatctcccatggcttcccccctgcagtagctgcgcaagacgatggtaccttaccaatgtcttgcgcgcaggaatcggggatggaccgccatcccgcggcctgcgcgtcagctcgcatcaacgtatag

SEQ ID NO: 623 - DNA, 855 bp, Artificial Sequence
  Modified Open Reading Frame
atggtgtccaagggcgaggagctgtttaccggcgtggtgcctatcctggtggagctggacggcgacgtgaacgggcacaagtttagcgtgtccggcgagggtgagggtgacgccacctatggcaagctcaccctgaagtttatatgcaccaccgggaaactgcccgtgccctggcccaccctcgtgacgacgctgacttacggagtccagtgcttcagcaggtaccccgaccacatgaagcagcatgacttctttaagtccgccatgcccgagggttacgtccaggagaggaccatcttctttaaagacgacggaaactataagaccagagccgaggtgaagttcgagggagacaccctggtgaacagaatcgagctgaagggcatcgacttcaaagaggatggcaatatcctgggccacaaacttgagtacaattacaacagccacaatgtgtacatcatggccgacaaacaaaaaaatgggatcaaggtgaactttaagatcagacacaacatcgaggacggcagcgtgcagctcgccgaccattatcaacaaaataccccgatcggcgacggacccgtgctgctgcccgacaaccattacctgagcacccagagcgccctgtccaaggacccgaacgagaagagagatcatatggtgctgctcgagtttgtgaccgccgccggcatcaccctgggcatggacgagctgtacaagcgatcccgcgacatcagccacggcttcccgcccgccgtggccgcgcaagacgacgggacgctgcccatgagctgcgctcaagagtccggcatggacagacaccccgccgcctgtgccagcgccaggatcaacgtgtaa

SEQ ID NO: 624 - DNA, 855 bp, Artificial Sequence
  Modified Open Reading Frame
atggtgtccaagggcgaggagctgtttaccggcgtggtgcctatcctggtggagctggacggcgacgtgaacgggcacaagtttagcgtgtccggcgagggtgagggtgacgccacctatggcaagctcaccctgaagtttatatgcaccaccgggaaactgcccgtgccctggcccaccctcgtgacgacgctgacttacggagtccagtgcttcagcaggtaccccgaccacatgaagcagcatgacttctttaagtccgccatgcccgagggttacgtccaggagaggaccatcttctttaaagacgacggaaactataagaccagagccgaggtgaagttcgagggagacaccctggtgaacagaatcgagctgaagggcatcgacttcaaagaggatggcaatatcctgggccacaaacttgagtacaattacaacagccacaatgtgtacatcatggccgacaaacaaaaaaacgggatcaaggtgaactttaaaatcagacacaacatcgaggacggcagcgtgcagctcgccgaccattatcaacaaaataccccgatcggcgacggacccgtgctgctgcccgacaaccattacctgagcacccagagcgccctgtccaaggaccctaacgagaagagagatcacatggtgctgctcgagttcgtgaccgccgccggcatcaccctgggcatggacgagctgtacaagcgatcccgcgacatcagccacggcttcccgcccgccgtggccgcgcaagacgacgggacgctgcccatgagctgcgctcaagagtccggcatggacagacaccccgccgcctgtgccagcgccaggatcaacgtgtaa

SEQ ID NO: 625 - DNA, 855 bp, Artificial Sequence
  Modified Open Reading Frame
atggtgtccaagggcgaggagctgtttaccggcgtggtgcctatcctggtggagctggacggcgacgtgaacgggcacaagtttagcgtgtccggcgagggtgagggtgacgccacctatggcaagctcaccctgaagtttatatgcaccaccgggaaactgcccgtgccctggcccaccctcgtgacgacgctgacttacggagtccagtgcttcagcaggtaccccgaccacatgaagcagcatgacttctttaagtccgccatgcccgagggttacgtccaggagaggaccatcttctttaaagacgacggaaactataagaccagagccgaggtgaagttcgagggagacaccctggtgaacagaatcgagctgaagggcatcgacttcaaagaggatggcaatatcctgggccacaaactggagtacaattacaacagccacaatgtgtacatcatggccgacaaacaaaaaaacgggatcaaggtgaactttaaaatcagacacaacatcgaggacggcagcgtgcagctcgccgaccattatcaacaaaataccccgatcggcgacggacccgtgctgctgcccgacaaccattacctgagcacccagagcgccctgtccaaggaccctaacgagaagagagatcacatggtgctgctcgagttcgtgaccgccgccggcatcaccctgggcatggacgagctgtacaagcgatcccgcgacatcagccacggcttcccgcccgccgtggccgcgcaagacgacgggacgctgcccatgagctgcgctcaagagtccggcatggacagacaccccgccgcctgtgccagcgccaggatcaacgtgtaa

SEQ ID NO: 626 - DNA, 855 bp, Artificial Sequence
  Modified Open Reading Frame
atggtgtccaagggcgaggagctgtttaccggcgtggtgcctatcctggtggagctggacggcgacgtgaacgggcacaagtttagcgtgtccggcgagggtgagggtgacgccacctatggcaagctcaccctgaagtttatatgcaccaccgggaaactgcccgtgccctggcccaccctcgtgacgacgctgacttacggagtccagtgcttcagcaggtaccccgaccacatgaagcagcatgacttctttaagtccgccatgcccgagggttacgtgcaggagaggaccatcttctttaaagacgacggaaactataagaccagagccgaggtgaagttcgagggagacaccctggtgaacagaatcgagctgaagggcatcgacttcaaagaggacggcaatatcctgggccacaaactggagtacaattacaacagccacaatgtgtacatcatggccgacaaacaaaaaaacgggatcaaggtgaactttaaaatcagacacaacatcgaggacggcagcgtgcagctcgccgaccattatcaacaaaataccccgatcggcgacggacccgtgctgctgcccgacaaccattacctgagcacccagagcgccctgtccaaggaccctaacgagaagagagatcacatggtgctgctcgagttcgtgaccgccgccggcatcaccctgggcatggacgagctgtacaagcgatcccgcgacatcagccacggcttcccgcccgccgtggccgcgcaagacgacgggacgctgcccatgagctgcgctcaagagtccggcatggacagacaccccgccgcctgtgccagcgccaggatcaacgtgtaa

SEQ ID NO: 627 - DNA, 855 bp, Artificial Sequence
  Modified Open Reading Frame
atggtgtccaagggcgaggagctgttcaccggcgtggtgcctatcctggtggagctggacggcgacgtgaacgggcacaagtttagcgtgtccggcgagggtgagggcgacgccacctacggcaagctcaccctgaagttcatctgcaccaccgggaaactgcccgtgccctggcccaccctcgtgacgacgctgacttacggagtccagtgcttcagcaggtaccccgaccacatgaagcagcatgacttctttaagtccgccatgcccgagggttacgtgcaggagaggaccatcttctttaaagacgacggaaactataagaccagagccgaggtgaagttcgagggagacaccctggtgaacagaatcgagctgaagggcatcgacttcaaagaggacggcaatatcctgggccacaaactggagtacaattacaacagccacaatgtgtacatcatggccgacaaacaaaaaaacgggatcaaggtgaactttaaaatcagacacaacatcgaggacggcagcgtgcagctcgccgaccattatcaacaaaataccccgatcggcgacggacccgtgctgctgcccgacaaccattacctgagcacccagagcgccctgtccaaggaccctaacgagaagagagatcacatggtgctgctcgagttcgtgaccgccgccggcatcaccctgggcatggacgagctgtacaagcgatcccgcgacatcagccacggcttcccgcccgccgtggccgcgcaagacgacgggacgctgcccatgagctgcgctcaagagtccggcatggacagacaccccgccgcctgtgccagcgccaggatcaacgtgtaa

SEQ ID NO: 628 - DNA, 855 bp, Artificial Sequence
  Modified Open Reading Frame
atggtgtccaagggcgaggagctgttcaccggcgtggtgcctatcctggtggagctggacggcgacgtgaacgggcacaagtttagcgtgtccggcgagggtgagggcgacgccacctacggcaagctcaccctgaagttcatctgcaccaccgggaaactgcccgtgccctggcccaccctcgtgacgacgctgacttacggagtccagtgcttcagcaggtaccccgaccacatgaagcagcatgacttctttaagtccgccatgcccgagggttacgtgcaggagaggaccatcttctttaaagacgacggaaactataagaccagagccgaggtgaagttcgagggagacaccctggtgaacagaatcgagctgaagggcatcgacttcaaagaggacggcaatatcctgggccacaaactggagtacaattacaacagccacaatgtgtacatcatggccgacaaacaaaaaaacgggatcaaggtgaactttaaaatcagacacaacatcgaggacggcagcgtgcagctcgccgaccattatcaacaaaataccccgatcggcgacggacccgtgctgctgcccgacaaccattacctgagcacccagagcgccctgtccaaggaccctaacgagaagagagatcacatggtgctgctcgagttcgtgaccgccgccggcatcaccctgggcatggacgagctgtacaagcgatcccgcgacatcagccacggcttcccgcccgccgtggccgcgcaagacgacgggacgctgcccatgagctgcgcccaagagtccggcatggacagacaccccgccgcctgtgccagcgccaggatcaacgtgtaa

SEQ ID NO: 629 - DNA, 855 bp, Artificial Sequence
  Modified Open Reading Frame
atggtgtccaagggcgaggagctgttcaccggcgtggtgcctatcctggtggagctggacggcgacgtgaacgggcacaagtttagcgtgtccggcgagggtgagggcgacgccacctacggcaagctcaccctgaagttcatctgcaccaccgggaaactgcccgtgccctggcccaccctcgtgacgacgctgacttacggagtccagtgcttcagcaggtaccccgaccacatgaagcagcatgacttctttaagtccgccatgcccgagggttacgtgcaggagaggaccatcttctttaaagacgacggaaactataagaccagagccgaggtgaagttcgagggagacaccctggtgaacagaatcgagctgaagggcatcgacttcaaagaggacggcaatatcctgggccacaaactggagtacaattacaacagccacaatgtgtacatcatggccgacaaacaaaaaaacgggatcaaggtgaactttaaaatcagacacaacatcgaggacggcagcgtgcagctcgccgaccattatcaacaaaataccccgatcggcgacggacccgtgctgctgcccgacaaccattacctgagcacccagagcgccctgtccaaggaccctaacgagaagagagatcacatggtgctgctcgagttcgtgaccgccgccggcatcaccctgggcatggacgagctgtacaagagatcccgcgacatcagccacggcttcccgcccgccgtggccgcgcaagacgacgggacgctgcccatgagctgcgcccaagagtccggcatggacagacaccccgccgcctgtgccagcgccaggatcaacgtgtaa

SEQ ID NO: 630 - DNA, 855 bp, Artificial Sequence
  Modified Open Reading Frame
atggtgtccaagggcgaggagctgttcaccggcgtggtgcctatcctggtggagctggacggcgacgtgaacgggcacaagtttagcgtgtccggcgagggtgagggcgacgccacctacggcaagctcaccctgaagttcatctgcaccaccgggaaactgcccgtgccctggcccaccctcgtgacgacgctgacttacggagtccagtgcttcagcaggtaccccgaccacatgaagcagcatgacttctttaagtccgccatgcccgagggctacgtgcaggagaggaccatcttctttaaagacgacggaaactataagaccagagccgaggtgaagttcgagggagacaccctggtgaacagaatcgagctgaagggcatcgacttcaaagaggacggcaacatcctgggccacaaactggagtacaattacaacagccacaatgtgtacatcatggccgacaaacaaaaaaacgggatcaaggtgaactttaaaatcagacacaacatcgaggacggcagcgtgcagctcgccgaccattatcaacaaaataccccgatcggcgacggacccgtgctgctgcccgacaaccattacctgagcacccagagcgccctgtccaaggaccctaacgagaagagagatcacatggtgctgctcgagttcgtgaccgccgccggcatcaccctgggcatggacgagctgtacaagagatcccgcgacatcagccacggcttcccgcccgccgtggccgcgcaagacgacgggacgctgcccatgagctgcgcccaagagtccggcatggacagacaccccgccgcctgtgccagcgccaggatcaacgtgtaa

SEQ ID NO: 631 - DNA, 855 bp, Artificial Sequence
  Modified Open Reading Frame
atggtgtccaagggcgaggagctgttcaccggcgtggtgcctatcctggtggagctggacggcgacgtgaacgggcacaagtttagcgtgtccggcgagggtgagggcgacgccacctacggcaagctcaccctgaagttcatctgcaccaccgggaaactgcccgtgccctggcccaccctcgtgacgacgctgacttacggagtccagtgcttcagcaggtaccccgaccacatgaagcagcatgacttctttaagtccgccatgcccgagggctacgtgcaggagaggaccatcttctttaaagacgacggaaactataagaccagagccgaggtgaagttcgagggagacaccctggtgaacagaatcgagctgaagggcatcgacttcaaagaggacggcaacatcctgggccacaaactggagtacaattacaacagccacaatgtgtacatcatggccgacaaacaaaaaaacgggatcaaggtgaactttaaaatcagacacaacatcgaggacggcagcgtgcagctcgccgaccattatcagcagaacacacccatcggcgacggacccgtgctgctgcccgacaaccattacctgagcacccagagcgccctgtccaaggaccctaacgagaagagagatcacatggtgctgctcgagttcgtgaccgccgccggcatcaccctgggcatggacgagctgtacaagagatcccgcgacatcagccacggcttcccgcccgccgtggccgcgcaagacgacgggacgctgcccatgagctgcgcccaagagtccggcatggacagacaccccgccgcctgtgccagcgccaggatcaacgtgtaa

SEQ ID NO: 632 - DNA, 855 bp, Artificial Sequence
  Modified Open Reading Frame
atggtgtccaagggcgaggagctgttcaccggcgtggtgcctatcctggtggagctggacggcgacgtgaacgggcacaagtttagcgtgtccggcgagggtgagggcgacgccacctacggcaagctcaccctgaagttcatctgcaccaccgggaaactgcccgtgccctggcccaccctcgtgacgacgctgacttacggagtccagtgcttcagcaggtaccccgaccacatgaagcagcatgacttctttaagtccgccatgcccgagggctacgtgcaggagagaaccatcttctttaaagacgacggaaactataagaccagagccgaggtgaagttcgagggagacaccctggtgaacagaatcgagctgaagggcatcgacttcaaagaggacggcaacatcctgggccacaaactggagtacaattacaacagccacaatgtgtacatcatggccgacaaacaaaaaaacgggatcaaggtgaactttaaaatcagacacaacatcgaggacggcagcgtgcagctcgccgaccattatcagcagaacacacccatcggcgacggacccgtgctgctgcccgacaaccattacctgagcacccagagcgccctgtccaaggaccctaacgagaagagagatcacatggtgctgctcgagttcgtgaccgccgccggcatcaccctgggcatggacgagctgtacaagagatcccgcgacatcagccacggcttcccgcccgccgtggccgcgcaagacgacgggaccctgcccatgagctgcgcccaagagtccggcatggacagacaccccgccgcctgtgccagcgccaggatcaacgtgtaa

SEQ ID NO: 633 - DNA, 855 bp, Artificial Sequence
  Modified Open Reading Frame
atggtgtccaagggcgaggagctgttcaccggcgtggtgcctatcctggtggagctggacggcgacgtgaacgggcacaagtttagcgtgtccggcgagggtgagggcgacgccacctacggcaagctcaccctgaagttcatctgcaccaccggcaaactgcccgtgccctggcccaccctcgtgacgaccctgacttacggagtccagtgcttcagcaggtaccccgaccacatgaagcagcatgacttctttaagtccgccatgcccgagggctacgtgcaggaaagaaccatcttctttaaagacgacggaaactataagaccagagccgaggtgaagttcgagggagacaccctggtgaacagaatcgagctgaagggcatcgacttcaaagaggacggcaacatcctgggccacaaactggagtacaattacaacagccacaatgtgtacatcatggccgacaaacaaaaaaacgggatcaaggtgaactttaaaatcagacacaacatcgaggacggcagcgtgcagctcgccgaccactaccagcagaacacacccatcggcgacggacccgtgctgctgcccgacaaccattacctgagcacccagagcgccctgtccaaggaccctaacgagaagagagatcacatggtgctgctcgagttcgtgaccgccgccggcatcaccctgggcatggacgagctgtacaagagatcccgcgacatcagccacggcttcccgcccgccgtggccgcgcaagacgacgggaccctgcccatgagctgcgcccaagagtccggcatggacagacaccccgccgcctgtgccagcgccaggatcaacgtgtaa

SEQ ID NO: 634 - DNA, 855 bp, Artificial Sequence
  Modified Open Reading Frame
atggtatcaaaaggtgaggaattgtttactggtgtagtccctatcctcgttgaactggacggtgacgttaatggacacaaattttctgtctctggcgaaggagaaggcgatgctacttatgggaaacttactctaaaattcatatgcacgacaggcaaattgcctgtcccatggcctacgctcgtgaccacgttaacgtatggagtgcagtgcttcagcaggtatccagatcacatgaaacaacatgacttctttaaatcggctatgcccgaagggtatgtgcaggagcgaacaatcttctttaaagatgacggcaactacaagacaagggctgaagttaagtttgagggcgatacgctagtcaaccgcatcgaattgaagggtatagattttaaggaagacgggaacatactgggccataagcttgagtacaattataactcacacaacgtctacattatggcggataagcaaaagaatggaattaaggtaaacttcaaaatacgacacaatattgaagacggatccgtgcagctagcagatcactaccagcagaatactcccatcggtgacgggccagtacttctgccggacaaccattacttatccacccagtccgcactctcgaaggatcctaatgagaaacgagatcacatggtcctcttggaatttgttactgcagcaggcatcactctaggaatggatgagttgtacaaacggagtagagatatcagccatggcttcccaccagcagttgcagcgcaagatgacggaactttgccaatgtcctgtgcacaggaatcaggcatggatagacaccccgcggcctgcgccagcgcacgtataaatgtctaa

SEQ ID NO: 635 - DNA, 855 bp, Artificial Sequence
  Modified Open Reading Frame
atggtatcaaaaggtgaggaattgtttactggtgtagtccctatcctcgttgaactggacggtgacgttaatggacacaaattttctgtctctggcgaaggagaaggcgatgctacttatgggaaacttactctaaaattcatatgcacgacaggcaaattgcctgtcccatggcctacgctcgtgaccacgttaacgtatggagtgcagtgcttcagcaggtatccagatcacatgaaacaacatgacttctttaaatcggctatgcccgaagggtatgtgcaggagcgaacaatcttctttaaagatgacggcaactacaagacaagggctgaagttaagtttgagggcgatacgctagtcaaccgcatcgaattgaagggtatagattttaaggaagacgggaacatactgggccataagcttgagtacaattataactcacacaacgtctacattatggcggataagcaaaagaatggaattaaggtaaacttcaaaatacgacacaatattgaagacggatccgtgcagctagcagatcactaccagcagaatactcccatcggtgacgggccagtacttctgcccgacaaccattacttatccacccagtccgcactctcgaaggatcctaatgagaaacgagatcacatggtcctcttggaatttgttactgcagcaggcatcactctaggaatggatgagttgtacaaacggagtagagatatcagccatggcttcccaccagcagttgcagcgcaagatgacggaactttgccaatgtcctgtgcacaggaatcaggcatggatagacaccccgcggcctgcgccagcgcacgtataaatgtctaa

SEQ ID NO: 636 - DNA, 855 bp, Artificial Sequence
  Modified Open Reading Frame
atggtatcaaaaggtgaggaattgtttactggtgtagtccctatcctcgttgaactggacggtgacgttaatggacacaaattttctgtctctggcgaaggagaaggcgatgctacttatgggaaacttactctaaaattcatatgcacgacaggcaaattgcctgtcccatggcctacgctcgtgaccacgttaacgtatggagtgcagtgcttcagcaggtatccagatcacatgaaacaacatgacttctttaaatcggctatgcccgaagggtatgtgcaggagcgaacaatcttctttaaagatgacggcaactacaagacaagggctgaagttaagtttgagggagatacgctagtcaaccgcatcgaattgaagggtatagattttaaggaagacgggaacatactgggccataagcttgagtacaattataactcacacaacgtctacattatggcggataagcaaaagaatggaattaaggtaaacttcaaaatacgacacaatattgaagacggatccgtgcagctagcagatcactaccagcagaatactcccatcggtgacgggccagtacttctgcccgacaaccattacttatccacccagtccgcactctcgaaggatcctaatgagaaacgagatcacatggtcctcttggaatttgttactgcagcaggcatcactctaggaatggatgagttgtacaaacggagtagagatatcagccatggcttcccaccagcagttgcagcgcaagatgacggaactttgccaatgtcctgtgcacaggaatcaggcatggatagacaccccgcggcctgcgccagcgcacgtataaatgtctaa

SEQ ID NO: 637 - DNA, 855 bp, Artificial Sequence
  Modified Open Reading Frame
atggtatcaaaaggtgaggaattgtttactggtgtagtccctatcctcgttgaactggacggtgacgttaatggacacaaattttctgtctctggcgaaggagaaggcgatgctacttatgggaaacttactctaaaattcatatgcacgacaggcaaattgcctgtcccatggcctacgctcgtgaccacgttaacgtatggagtgcagtgcttcagcaggtatccagatcacatgaaacaacatgacttctttaaatcggctatgcccgaagggtatgtgcaggagcgaacaatcttctttaaagatgacggcaactacaagacaagggctgaagttaagtttgagggagatacgctagtcaaccgcatagaattgaagggtatagattttaaggaagacgggaacatactgggccataagcttgagtacaattataactcacacaacgtctacattatggcggataagcaaaagaatggaattaaggtaaacttcaaaatacgacacaatattgaagacggatccgtgcagctagcagatcactaccagcagaatactcccatcggtgacgggccagtacttctgcccgacaaccattacttatccacccagtccgcactctcgaaggatcctaatgagaaacgagatcacatggtcctcttggaatttgttactgcagcaggcatcactctaggaatggatgagttgtacaaacggagtagagatatcagccatggcttcccaccagcagttgcagcgcaagatgacggaactttgccaatgtcctgtgcacaggaatcaggcatggatagacaccccgcggcctgcgccagcgcacgtataaatgtctaa

SEQ ID NO: 638 - DNA, 855 bp, Artificial Sequence
  Modified Open Reading Frame
atggtgtccaagggcgaggagctgttcaccggcgtggttcctatcctggtggagctggacggcgacgtgaacggccacaagttttctgtgagcggcgagggcgaaggcgacgccacctatggcaagctgaccctgaagttcatctgcaccacgggcaagttacccgtaccgtggcccaccctcgtgaccacgctgacctacggagtccagtgcttctctcgatatccggaccatatgaagcagcacgacttcttcaagtcagccatgcccgagggctatgtccaggagcgtaccatcttctttaaagacgacggaaactacaaaacgagggccgaggtgaagttcgaaggagacaccctggtcaatcgtattgagttgaagggcatcgactttaaagaagatggtaacatccttggacataagctggagtacaactataacagccataacgtttacatcatggccgacaaacagaagaatgggatcaaggtaaactttaaaatccgtcataacatcgaagacggcagcgtgcagctcgccgaccactaccagcagaacacacccatcggcgacggtcccgttctgctgcccgacaaccattacctgagcacgcagtcagccctgtccaaggaccctaacgagaagagggaccacatggtgctgcttgagttcgtcaccgccgccgggatcaccctgggcatggatgagctttataagcgcagccgtgacatcagccacggcttcccgccggcggtggccgcccaagacgacgggaccctgcccatgagctgcgcccaagagagcggcatggacagacaccccgccgcctgtgcctccgcgcggatcaacgtgtag

SEQ ID NO: 639 - DNA, 855 bp, Artificial Sequence
  Modified Open Reading Frame
atggtatcaaaaggtgaggaattgtttactggtgtagtccctatcctcgttgaactggacggtgacgttaatggacacaaattttctgtctctggcgaaggagaaggcgatgctacttatgggaaacttactctaaaattcatatgcacgacaggcaaattgcctgtcccatggcctacgctcgtgaccacgttaacgtatggagtgcagtgcttcagcaggtatccagatcacatgaaacaacatgacttctttaaatcggctatgcccgaagggtatgtgcaggagcgaacaatcttctttaaagatgacggcaactacaagacaagggctgaagttaagtttgagggagatacgctagtcaaccgcatagaattgaagggtatagattttaaggaagacgggaacatactgggccataagcttgagtacaattataactcacacaacgtctacattatggcggataagcaaaagaatggaatcaaggtaaacttcaaaatacgacacaatattgaagacggatccgtgcagctagcagatcactaccagcagaatactcccatcggtgacgggccagtacttctgcccgacaaccattacttatccacccagtccgcactctcgaaggatcctaatgagaaacgagatcacatggtcctcttggaatttgttactgcagcaggcatcactctaggaatggatgagttgtacaaacggagtagagatatcagccatggcttcccaccagcagttgcagcgcaagatgacggaactttgccaatgtcctgtgcacaggaatcaggcatggatagacaccccgcggcctgcgccagcgcacgtataaatgtctaa

SEQ ID NO: 640 - DNA, 855 bp, Artificial Sequence
  Modified Open Reading Frame
atggtttcaaagggagaagagttattcaccggcgtggtgccgattctggtggagctggacggcgacgtgaacggacacaagttctcggtgagtggcgaaggtgaaggtgacgccacgtacgggaagcttaccctgaaattcatctgtaccacgggtaagcttcccgtgccgtggcccaccttggtgaccactctgacttacggcgtgcagtgcttcagtcggtaccccgaccacatgaagcagcacgacttcttcaagtctgccatgcctgaaggatatgtccaggaaaggaccatattcttcaaggacgatggcaattataagacgcgtgcggaagtcaagtttgaaggcgatacccttgtcaatagaattgagctcaagggtatcgacttcaaagaggacggtaatatactcgggcacaagctcgagtataattacaattcccacaacgtctatataatggccgataagcagaagaatggcatcaaggtcaacttcaagattcgccacaacatcgaggacgggtccgttcagctcgccgaccactaccagcagaatacaccaattggtgacggcccagtgttgctgccggacaaccattatcttagcacgcagtcagcgctgtcgaaggacccgaatgagaagcgcgaccatatggttcttctagagttcgtcactgccgcagggatcaccctcggcatggacgagctctacaagcgtagtcgcgacatctcacacgggttcccgccagcggtggctgcgcaagatgatgggacgttgccgatgagctgcgcgcaggagtccggcatggatagacatcctgccgcctgcgccagcgctcggatcaacgtctaa

SEQ ID NO: 641 - DNA, 855 bp, Artificial Sequence
  Modified Open Reading Frame
atggtgtccaagggcgaggagctgtttaccggggtggttcctatcctggtggagctggacggcgacgtgaacggccacaagttttctgtgagcggcgagggcgaaggcgacgccacctatggcaagctgaccctgaagttcatatgcaccacgggcaagttacccgtaccgtggcccaccctcgtgaccaccctgacctacggagtccagtgcttctctcgatatccggaccatatgaagcagcacgacttcttcaagtcagccatgcccgagggctatgtccaggagcgtaccatcttctttaaagacgacggaaactacaaaacgagggccgaggtgaagttcgaaggagacaccctggtcaatcgtattgagttgaagggcatcgactttaaagaagatggtaacatccttggacataagctggagtacaactataacagccataacgtttacatcatggccgacaaacagaagaatgggatcaaggtaaactttaaaatccgtcataacatcgaagacggcagcgtgcagctcgccgaccactaccagcagaacacacccatcggcgacggtcccgttctgctgcccgacaaccattacctgagcacgcagtcagccctgtccaaggaccctaacgagaagagggaccacatggtgctgcttgagttcgtcaccgccgccgggatcaccctgggcatggatgagctttataagcgcagccgtgacatcagccacggcttcccgccggcggtggccgcccaagacgacgggaccctgcccatgagctgcgcccaagagagcggcatggacagacaccccgccgcctgtgcctccgcgcggatcaacgtgtag

SEQ ID NO: 642 - DNA, 855 bp, Artificial Sequence
  Modified Open Reading Frame
atggtatcaaaaggtgaggaattgtttactggtgtagtccctatcctcgttgaactggacggtgacgttaatggacacaaattttctgtctctggcgaaggagaaggcgatgctacttatgggaaacttactctaaaattcatatgcacgacaggcaaattgcctgtcccatggcctacgctcgtgaccacgttaacgtatggagtgcagtgcttcagcaggtatccagatcacatgaaacaacatgacttctttaaatcggctatgcccgaagggtatgtgcaggagcgaacaatcttctttaaagatgacggcaactacaagacaagggctgaagttaagtttgagggagatacgctagtcaaccgcatagaattgaagggtatagattttaaggaagacgggaacatactgggccataagcttgagtacaattataactcacacaacgtctacattatggcggataagcaaaagaatggaatcaaggtaaacttcaaaatacgacacaatattgaagacggatccgtgcagctagcagatcactaccagcagaatactcccatcggtgacgggccagtacttctgcccgacaaccattacttatccacccagtccgcactctcgaaggatcctaatgagaaacgagatcacatggtcctcttggaatttgttactgcagcaggcatcactctaggaatggatgagttgtacaaacggagtagagatatcagccatggcttcccaccagcagttgcagcgcaagatgacggaactttgccaatgtcctgtgcacaggagtcaggcatggatagacaccccgcggcctgcgccagcgcacgtataaatgtgtaa

SEQ ID NO: 643 - DNA, 855 bp, Artificial Sequence
  Modified Open Reading Frame
atggtgtccaagggcgaggagctgtttaccggggtggttcctatcctggtggagctggacggcgacgtgaacggccacaagttttctgtgagcggcgagggcgaaggcgacgccacctatggcaagctgaccctgaagttcatatgcaccacgggcaagttacccgtaccgtggcccaccctcgtgaccaccctgacctacggagtccagtgcttctctcgatatccggaccatatgaagcagcacgacttcttcaagtcagccatgcccgagggctatgtccaggagcgtaccatcttctttaaagacgacggaaactacaaaacgagggccgaggtgaagttcgaaggagacaccctggtcaatcgtattgagttgaagggcatcgactttaaagaagatggtaacatccttggacataagctggagtacaactataacagccataacgtttacatcatggccgacaaacagaagaatgggatcaaggtaaactttaaaatccgtcataacatcgaagacggcagcgtgcagctcgccgaccactaccagcagaacacacccatcggcgacggtcccgttctgctgcccgacaaccattacctaagcacgcaatcagccctgtcaaaggaccccaacgagaagagggaccacatggtgctgcttgagttcgtcaccgccgccgggatcaccctgggcatggatgagctttataagcgcagccgtgacatcagccacggcttcccgccggcggtggccgcgcaagacgacgggacgctgcccatgagctgcgcccaagagagcggcatggacagacaccccgccgcctgtgcctccgcgcggatcaacgtgtag

SEQ ID NO: 644 - DNA, 855 bp, Artificial Sequence
  Modified Open Reading Frame
atggtgtccaagggcgaagagctgtttaccggggtggttcctatactggtggagctggacggcgacgtgaacggccacaagttttctgtgagcggcgagggcgaaggcgacgccacctatggcaagctgaccctgaagttcatatgcaccacgggcaagttacccgtaccgtggcccaccctcgtgaccaccctgacctacggagtccagtgcttctctcgatatccggaccatatgaagcagcacgacttcttcaagtcagccatgcccgagggctatgtccaggagcgtaccatcttctttaaagacgacggaaactacaaaacgagggccgaggtgaagttcgaaggagacaccctggtcaatcgtattgagttgaagggcatcgactttaaagaagatggtaacatccttggacataagctggagtacaactataacagccataacgtttacatcatggccgacaaacagaagaatgggatcaaggtaaactttaaaatccgtcataacatcgaagacggcagcgtgcagctcgccgaccactaccagcagaacacacccatcggagacggtcccgttctgctgcccgacaaccattacctaagcacgcaatcagccctgtcaaaggaccccaacgagaagagggaccacatggtgctgcttgagttcgtcaccgccgccgggatcaccctgggcatggatgagctttataagcgcagccgtgacatcagccacggcttcccgccggcggtggccgcgcaggacgacgggacgctgcccatgagctgcgcccaagagagcggcatggacagacaccccgccgcctgtgcctctgcgcgtataaacgtgtag

SEQ ID NO: 645 - DNA, 855 bp, Artificial Sequence
  Modified Open Reading Frame
atggtgtccaagggcgaagagctgtttacaggggtggttcctatactggtggagttggacggcgacgtgaacggccacaagttttctgtgagcggcgagggcgaaggcgacgccacctatggcaagctgaccctgaagttcatatgcaccacgggcaagttacccgtaccgtggcccaccctcgtgaccaccctgacctacggagtccagtgcttctctcgatatccggaccatatgaagcagcacgacttcttcaagtcagccatgcccgagggctatgtccaggagcgtaccatcttctttaaagacgacggaaactacaaaacgagggccgaggtgaagttcgaaggagacaccctggtcaatcgtattgagttgaagggcatcgactttaaagaagatggtaacatccttggacataagctggagtacaactataacagccataacgtttacatcatggccgacaaacagaagaatgggatcaaggtaaactttaaaatccgtcataacatcgaagacggcagcgtgcagctcgccgaccactaccagcagaacacacccataggagacggtcccgttctgctgcccgacaaccactacctaagcacgcaatcagccctgtcaaaggaccccaacgagaagagggaccatatggtgctgcttgagttcgtcaccgccgccgggatcaccctgggcatggatgagctttataagcgcagccgtgacatcagccacggcttcccgccggcggtggccgcgcaggacgacgggacgctgcccatgagctgcgcccaagagagcggcatggacagacaccccgcggcctgtgcctctgcgcgtataaacgtgtag

SEQ ID NO: 646 - DNA, 855 bp, Artificial Sequence
  Modified Open Reading Frame
atggtgagcaaaggagaagagttatttaccggcgtggtgccgattctggtggagctggacggcgacgtgaacggacacaagttctcggtgagtggcgaaggtgaaggtgacgccacgtacgggaagcttaccctgaaattcatctgtaccacgggtaagcttcccgtaccgtggcccaccttggtgaccactctgacttacggcgtgcagtgcttcagtcggtaccccgaccacatgaagcagcacgacttcttcaagtctgccatgcctgaaggatatgtccaggaaaggaccatattcttcaaggacgatggcaattataagacgcgtgcggaagtcaagtttgaaggcgatacccttgtcaatagaattgagctcaagggtatcgacttcaaagaggacggtaatatactcgggcacaagctcgagtataattacaattcccacaacgtctatataatggccgataagcagaagaatggcatcaaggtcaacttcaagattcgccacaacatcgaggacgggtccgttcagctcgccgaccactaccagcagaatacaccaattggtgacggcccagtgttgctgccggacaaccattatcttagcacgcagtcagcgctgtcgaaggacccgaatgagaagcgcgaccatatggttcttctagagttcgtcactgccgcagggatcaccctcggcatggacgagctctacaagcgtagtcgcgacatctcacacgggttcccgccagcggtggctgcgcaagatgatgggacgttgccgatgagctgcgcgcaggagtccggcatggatagacatcctgccgcctgcgccagcgctcggatcaacgtctaa

SEQ ID NO: 647 - DNA, 855 bp, Artificial Sequence
  Modified Open Reading Frame
atggtgagcaagggagaggagttattcacaggcgtggtgcctattctggtggagctggacggcgacgtgaacggacacaagttctcggtgagtggcgaaggtgaaggtgacgccacgtacgggaagcttaccctgaaattcatctgtaccacgggtaagcttcccgtaccgtggcccaccttggtgaccactctgacttacggcgtgcagtgcttcagtcggtaccccgaccacatgaagcagcacgacttcttcaagtctgccatgcctgaaggatatgtccaggaaaggaccatattcttcaaggacgatggcaattataagacgcgtgcggaagtcaagtttgaaggcgatacccttgtcaatagaattgagctcaagggtatcgacttcaaagaggacggtaatatactcgggcacaagctcgagtataattacaattcccacaacgtctatataatggccgataagcagaagaatggcatcaaggtcaacttcaagattcgccacaacatcgaggacgggtccgttcagctcgccgaccactaccagcagaatacaccaatcggcgacggccccgtgctgttgccggacaaccattatcttagcacgcagtcagcgctgtcgaaggacccgaatgagaagcgcgaccatatggttcttctagagttcgtcactgccgcagggatcaccctcggcatggacgagctctacaagcgtagtcgcgacatctcacacgggttcccgccagcggtggctgcgcaagatgatgggacgttgccgatgagctgcgcgcaggagtccggcatggatagacatcctgccgcctgcgccagcgctcggatcaacgtctaa

SEQ ID NO: 648 - DNA, 855 bp, Artificial Sequence
  Modified Open Reading Frame
atggttagcaaaggagaagaattatttacaggagtcgtaccgattctggtggagctggacggcgacgtgaacggacacaagttctcggtgtcgggcgagggcgagggcgacgccacctacgggaagcttaccctgaagttcatctgcactacgggtaagcttcccgtgccctggcccaccttagtgaccaccctcacctatggcgtgcagtgcttcagtcggtaccccgaccacatgaagcagcacgacttcttcaagtcggccatgcccgagggctatgtccaagagcgtaccatcttctttaaagacgatggcaattacaagacccgggccgaggtgaagttcgagggcgacaccttggtgaaccggatcgagctaaagggcatcgactttaaagaagatggtaacattcttggacataagctcgagtataattataactcgcacaatgtgtatatcatggccgacaagcagaagaacggaatcaaagtgaactttaagatccgtcacaacatcgaggacgggtccgttcagctcgccgaccactaccaacaaaacacacccatcggcgacggtcccgttttattgcccgacaatcattacttaagcacacagagtgcattaagtaaagatccgaacgaaaaacgggaccacatggttcttttggagttcgtcactgccgcgggtatcaccctcggcatggacgagctctacaagaggagtcgggatattagccacggctttcctccagccgtggctgcgcaggatgatgggacgctgcccatgagctgcgcacaagaatccgggatggacaggcaccccgctgcctgtgccagtgcccggattaatgtttaa

SEQ ID NO: 649 - DNA, 855 bp, Artificial Sequence
  Modified Open Reading Frame
atggtgtcaaagggagaggagttatttaccggcgtggtgccgattctggtggagctggacggcgacgtgaacggacacaagttctcggtgagtggcgaaggtgaaggtgacgccacgtacgggaagcttaccctgaaattcatctgtaccacgggtaagcttcccgtaccgtggcccaccttggtgaccactctgacttacggcgtgcagtgcttcagtcggtaccccgaccacatgaagcagcacgacttcttcaagtctgccatgcctgaaggatatgtccaggaaaggaccatattcttcaaggacgatggcaattataagacgcgtgcggaagtcaagtttgaaggcgatacccttgtcaatagaattgagctcaagggtatcgacttcaaagaggacggtaatatactcgggcacaagctcgagtataattacaattcccacaacgtctatataatggccgataagcagaagaatggcatcaaggtcaacttcaagattcgccacaacatcgaggacgggtccgttcagctcgccgaccactaccagcagaatacaccaatcggcgacggccccgtgctgttgccggacaaccattatcttagcacgcagtcagcgctgtcgaaggacccgaatgagaagcgcgaccatatggttcttctagagttcgtcactgccgcagggatcaccctcggcatggacgagctctacaagcgtagtcgcgacatctcacacgggttcccgccagcggtggctgcgcaagatgatgggacgttgccgatgagctgcgcgcaggagtccggcatggatagacatcctgccgcctgcgccagcgctcggatcaacgtctaa

SEQ ID NO: 650 - DNA, 855 bp, Artificial Sequence
  Modified Open Reading Frame
atggtgtccaagggcgaggagctattcaccggcgtggtgccgattctggtggagctggacggcgacgtgaacggacacaagttctcggtgagtggcgaaggtgaaggtgacgccacgtacgggaagcttaccctgaaattcatctgtaccacgggtaagcttcccgtaccgtggcccaccttggtgaccactctgacttacggcgtgcagtgcttcagtcggtaccccgaccacatgaagcagcacgacttcttcaagtctgccatgcctgaaggatatgtccaggaaaggaccatattcttcaaggacgatggcaattataagacgcgtgcggaagtcaagtttgaaggcgatacccttgtcaatagaattgagctcaagggtatcgacttcaaagaggacggtaatatactcgggcacaagctcgagtataattacaattcccacaacgtctatataatggccgataagcagaagaatggcatcaaggtcaacttcaagattcgccacaacatcgaggacgggtccgttcagctcgccgaccactaccagcagaatacaccaatcggcgacggccccgtgctgttgccggacaaccattatcttagcacgcagtcagcgctgtcgaaggacccgaatgagaagcgcgaccatatggttcttctagagttcgtcactgccgcagggatcaccctcggcatggacgagctctacaagcgtagtcgcgacatctcacacgggttcccgccagcggtggctgcgcaagatgatgggacgttgccgatgagctgcgcgcaggagtccggcatggatagacatcctgccgcctgcgccagcgctcggatcaacgtctaa

SEQ ID NO: 651 - DNA, 855 bp, Artificial Sequence
  Modified Open Reading Frame
atggtgtcaaaaggagaggagctgttcaccggtgtggtgcctattctggtggagctggacggcgacgtgaacggacacaagttctcggtgagtggcgaaggtgaaggtgacgccacgtacgggaagcttaccctgaaattcatctgtaccacgggtaagcttcctgtaccgtggcccaccttggtgaccactctgacttacggcgtgcagtgcttcagtcggtaccccgaccacatgaagcagcacgacttcttcaagtctgccatgcctgaaggatatgtccaggaaaggaccatattcttcaaggacgatggcaattataagacgcgtgcggaagtcaagtttgaaggcgatacccttgtcaatagaattgagctcaagggtatcgacttcaaagaggacggtaatatactcgggcacaagctcgagtataattacaattcccacaacgtctatataatggccgataagcagaagaatggcatcaaggtcaacttcaagattcgccacaacatcgaggacgggtccgttcagctcgccgaccactaccagcagaatacacccatcggtgacggccctgtcctgcttccagacaatcattatcttagcacgcagtcagcgctgtcgaaggacccgaatgagaagcgcgaccatatggttcttctagagttcgtcactgccgcagggatcaccctcggcatggacgagctctacaagcgtagtcgcgacatctcacacgggttcccgccagcggtggctgcgcaagatgatggtacgttgccgatgagctgcgcgcaggagtccggcatggatagacatcctgccgcctgcgccagcgctcggatcaacgtctga

SEQ ID NO: 652 - DNA, 855 bp, Artificial Sequence
  Modified Open Reading Frame
atggttagcaaaggagaagaattatttacaggagtcgtccctattttggtggagctggacggcgacgtgaacggacacaagttctcggtgtcgggcgagggcgagggcgacgccacctacgggaagcttaccctgaagttcatctgcactacgggtaagcttcccgtgccctggcccaccttagtgaccaccctcacctatggcgtgcagtgcttcagtcggtaccccgaccacatgaagcagcacgacttcttcaagtcggccatgcccgagggctatgtccaagagcgtaccatcttctttaaagacgatggcaattacaagacccgggccgaggtgaagttcgagggcgacaccttggtgaaccggatcgagctaaagggcatcgactttaaagaagatggtaacattcttggacataagctcgagtataattataactcgcacaatgtgtatatcatggccgacaagcagaagaacggaatcaaagtgaactttaagatccgtcacaacatcgaggacgggtccgttcagctcgccgaccactaccagcagaatacgccaataggagacggacccgtcttattgcccgacaatcactatttgagcacacagagtgcactatctaaggacccgaacgagaagcgggaccacatggtgcttttggagttcgtcactgccgcgggtatcaccctcggcatggacgagctctacaagagatcccgggacatcagccacggctttcctccagccgtggctgcgcaggatgatgggacgctgcccatgagctgcgcacaagaatccgggatggacaggcaccccgctgcctgtgccagtgcccggattaatgtttaa

SEQ ID NO: 653 - DNA, 855 bp, Artificial Sequence
  Modified Open Reading Frame
atggttagcaaaggagaagaattatttacaggagtggtgcctattttggtggagctggacggcgacgtgaacggacacaagttctcggtgtcgggcgagggcgagggcgacgccacctacgggaagcttaccctgaagttcatctgcactacgggtaagcttcccgtgccctggcccaccttagtgaccaccctcacctatggcgtgcagtgcttcagtcggtaccccgaccacatgaagcagcacgacttcttcaagtcggccatgcccgagggctatgtccaagagcgtaccatcttctttaaagacgatggcaattacaagacccgggccgaggtgaagttcgagggcgacaccttggtgaaccggatcgagctaaagggcatcgactttaaagaagatggtaacattcttggacataagctcgagtataattataactcgcacaatgtgtatatcatggccgacaagcagaagaacggaatcaaagtgaactttaagatccgtcacaacatcgaggacgggtccgttcagctcgccgaccactaccagcagaatacaccaataggagacggacccgtcttattgcccgacaatcactatttgagcacacagagtgcactatctaaggacccgaacgagaagcgggaccacatggtgcttttggagttcgtcactgccgcgggtatcaccctcggcatggacgagctctacaagagatcccgggacatcagccacggctttcctccagccgtggctgcgcaggatgatgggacgctgcccatgagctgcgcgcaggaatccgggatggacaggcaccccgctgcctgtgccagtgcccggattaatgtttaa

SEQ ID NO: 654 - DNA, 855 bp, Artificial Sequence
  Modified Open Reading Frame
atggttagcaaaggagaagaattatttacaggagtcgtgcctattttggtggagctggacggcgacgtgaacggacacaagttctcggtgtcgggcgagggcgagggcgacgccacctacgggaagcttaccctgaagttcatctgcactacgggtaagcttcccgtgccctggcccaccttagtgaccaccctcacctatggcgtgcagtgcttcagtcggtaccccgaccacatgaagcagcacgacttcttcaagtcggccatgcccgagggctatgtccaagagcgtaccatcttctttaaagacgatggcaattacaagacccgggccgaggtgaagttcgagggcgacaccttggtgaaccggatcgagctaaagggcatcgactttaaagaagatggtaacattcttggacataagctcgagtataattataactcgcacaatgtgtatatcatggccgacaagcagaagaacggaatcaaagtgaactttaagatccgtcacaacatcgaggacgggtccgttcagctcgccgaccactaccagcagaatacaccaataggagacggacccgtcttattgcccgacaatcactatttgagcacacagagtgcactatctaaggacccgaacgagaagcgggaccacatggtgcttttggagttcgtcactgccgcgggtatcaccctcggcatggacgagctctacaagagatcccgggacatcagccacggctttcctccagccgtggctgcgcaggatgatgggacgctgcccatgagctgcgcgcaggaatccgggatggacaggcaccccgctgcctgtgccagtgcccggattaatgtttaa

SEQ ID NO: 655 - DNA, 855 bp, Artificial Sequence
  Modified Open Reading Frame
atggtgtccaagggcgaagagctttttacaggggtggttcctatactggtggagttggacggcgacgtgaacggccacaagttttctgtgagcggcgagggcgaaggcgacgccacctatggcaagctgaccctgaagttcatatgcaccacgggcaagttacccgtaccgtggcccaccctcgtgaccaccctgacctacggagtccagtgcttctctcgatatccggaccatatgaagcagcacgacttcttcaagtcagccatgcccgagggctatgtccaggagcgtaccatcttctttaaagacgacggaaactacaaaacgagggccgaggtgaagttcgaaggagacaccctggtcaatcgtattgagttgaagggcatcgactttaaagaagatggtaacatccttggacataagctggagtacaactataacagccataacgtttacatcatggccgacaaacagaagaatgggatcaaggtaaactttaaaatccgtcataacatcgaagacggcagcgtgcagctcgccgaccactaccagcagaacacacccataggagacggtcccgttctgctgcccgacaaccactacctaagcacgcaatcagccctgtcaaaggaccccaacgagaagagggaccatatggtgctgcttgagttcgtcaccgccgccgggatcaccctgggcatggatgagctttataagcgcagccgtgacatcagccacggcttcccgccggcggtggccgcgcaggacgacgggacgctgcccatgagctgcgcccaagagagcggcatggacagacaccccgcggcctgtgcctctgcgcgtataaacgtgtag

SEQ ID NO: 656 - DNA, 855 bp, Artificial Sequence
  Modified Open Reading Frame
atggtttctaaaggtgaggagctgttcaccggtgtggtgcctattctggtggagctggacggcgacgtgaacggacacaagttctcggtgagtggcgaaggtgaaggtgacgccacgtacgggaagcttaccctgaaattcatctgtaccacgggtaagcttcccgtgccgtggcccaccttggtgaccactctgacttacggcgtgcagtgcttcagtcggtaccccgaccacatgaagcagcacgacttcttcaagtctgccatgcctgaaggatatgtccaggaaaggaccatattcttcaaggacgatggcaattataagacgcgtgcggaagtcaagtttgaaggcgatacccttgtcaatagaattgagctcaagggtatcgacttcaaagaggacggtaatatactcgggcacaagctcgagtataattacaattcccacaacgtctatataatggccgataagcagaagaatggcatcaaggtcaacttcaagattcgccacaacatcgaggacgggtccgttcagctcgccgaccactaccagcagaatacacccatcggtgacggccctgtgttgttgcccgacaaccattatcttagcacgcagtcagcgctgtcgaaggacccgaatgagaagcgcgaccatatggttcttctagagttcgtcactgccgcagggatcaccctcggcatggacgagctctacaagcgtagtcgcgacatctcacacgggttcccgccagcggtggctgcgcaagatgatgggacgttgccgatgagctgcgcgcaggagtccggcatggatagacatcctgccgcctgcgccagcgctcggatcaacgtctaa

SEQ ID NO: 657 - DNA, 855 bp, Artificial Sequence
  Modified Open Reading Frame
atggtgtccaagggcgaggagctgttcacaggggtggttcctatactggtggagttggacggcgacgtgaacggccacaagttttctgtgagtggtgagggcgaaggcgacgccacatatggcaagctgaccctgaagttcatctgcacgacgggcaagttaccggtgccgtggcccaccctggtcaccaccctgacctacggagtccagtgcttctctcggtatccggatcatatgaaacagcatgacttcttcaagagtgccatgcccgaaggctatgtccaggagcgtaccatcttctttaaagacgatggtaactacaaaacgagggccgaggtgaagttcgaaggagacaccctggtcaatcgtattgagttgaagggcatcgactttaaagaagatggtaacatccttggacataagcttgagtacaactataacagtcataatgtttacataatggccgataaacagaagaatggcatcaaggtaaactttaaaatccgtcataacattgaagacggcagcgtgcagttggcggaccactaccagcagaacacacccataggagacggtcccgttctgctgcccgacaaccactacctaagcacgcaatcagccctgtcaaaggaccccaacgagaagagggaccatatggtgctgcttgagttcgtcaccgccgccgggatcaccctgggcatggatgagctttataagcgcagccgtgacatcagccacggattcccgccggcggtggccgcgcaggacgacgggacgctgcccatgagctgcgcccaagagagcgggatggacagacatcccgcggcctgtgcctctgcgcgtataaacgtgtag

SEQ ID NO: 658 - DNA, 855 bp, Artificial Sequence
  Modified Open Reading Frame
atggtgtccaagggcgaggagttgttcaccggggttgtgcccatacttgttgaactcgacggtgacgtcaatgggcacaagtttagcgtttccggtgagggagagggagatgcgacttacggaaagctaactctcaagttcatctgcaccaccggtaaacttcctgtgccctggcccacactcgtcacgactctcacttatggagtgcagtgcttcagtcggtacccagaccacatgaaacagcacgacttcttcaaaagtgcgatgcctgaggggtatgtgcaagagcgaactattttttttaaggacgatggaaactacaaaactcgcgcagaggtgaagtttgaaggtgacaccctcgttaacagaatagagcttaaaggcattgacttcaaagaggacggcaacatacttgggcacaaactcgagtacaactataacagccataacgtgtacatcatggccgataagcagaagaacggtatcaaggtcaacttcaagatacggcacaatatcgaagacggcagtgttcagcttgctgatcactatcagcagaacacgccgattggagatggtcccgtacttttacctgacaaccattacttaagcacgcagagcgcactatctaaagacccgaacgaaaagagagatcatatggttcttcttgagttcgtgaccgctgcgggcataactcttggtatggacgaactgtacaagagatcgcgagatatcagtcatggctttccgccagcagtggcggcacaggatgacggaactctcccgatgtcttgtgcacaagagtccggcatggaccgtcatcctgctgcttgtgcctctgcacgtattaatgtctga

SEQ ID NO: 659 - DNA, 855 bp, Artificial Sequence
  Modified Open Reading Frame
atggttagcaaaggagaagaattatttacaggagttgtgcctattttggtggagctggacggcgacgtgaacggacacaagttctcggtgtcgggcgagggcgagggcgacgccacctacgggaagcttaccctgaagttcatctgcactacgggtaagcttcccgtgccctggcccaccttagtgaccaccctcacctatggcgtgcagtgcttcagtcggtaccccgaccacatgaagcagcacgacttcttcaagtcggccatgcccgagggctatgtccaagagcgtaccatcttctttaaagacgatggcaattacaagacccgggccgaggtgaagttcgagggcgacaccttggtgaaccggatcgagctaaagggcatcgactttaaagaagatggtaacattcttggacataagctcgagtataattataactcgcacaatgtgtatatcatggccgacaagcagaagaacggaatcaaagtgaactttaagatccgtcacaacatcgaggacgggtccgttcagctcgccgaccactaccagcagaatacaccaataggagacggacccgtcttattgcccgacaatcactatttgagcacacagagtgcactatctaaggacccgaacgagaagcgggaccacatggtgcttttggagttcgtcaccgccgcgggtatcaccctcggcatggacgagctctacaagagatcccgggacatcagccacggctttcctccagccgtggctgcgcaggacgacgggacgctgcccatgagctgcgcccaggagtccggcatggacaggcaccccgctgcctgtgccagtgccaggatcaatgtttag

SEQ ID NO: 660 - DNA, 855 bp, Artificial Sequence
  Modified Open Reading Frame
atggtatcaaaaggagaagagttgttcaccggggttgtgcccatacttgttgaactcgacggtgacgtcaatgggcacaagtttagcgtttccggtgagggagagggagatgcgacttacggaaagctaactctcaagttcatctgcaccaccggtaaacttcctgtgccctggcccacactcgtcacgactctcacttatggagtgcagtgcttcagtcggtacccagaccacatgaaacagcacgacttcttcaaaagtgcgatgcctgaggggtatgtgcaagagcgaactattttttttaaggacgatggaaactacaaaactcgcgcagaggtgaagtttgaaggtgacaccctcgttaacagaatagagcttaaaggcattgacttcaaagaggacggcaacatacttgggcacaaactcgagtacaactataacagccataacgtgtacatcatggccgataagcagaagaacggtatcaaggtcaacttcaagatacggcacaatatcgaagacggcagtgttcagcttgctgatcactatcagcagaacacgccgattggagatggtcccgtacttttacctgacaaccattacttaagcacgcagagcgcactatctaaagacccgaacgaaaagagagatcatatggttcttcttgagttcgtgaccgctgcgggcataactcttggtatggacgaactgtacaagagatcgcgagatatcagtcatggctttccgccagcagtggcggcacaggatgacggaactctcccgatgtcttgtgcacaagagtccggcatggaccgtcatcctgctgcttgtgcctctgcacgtattaatgtctga

SEQ ID NO: 661 - DNA, 855 bp, Artificial Sequence
  Modified Open Reading Frame
atggttagcaaaggagaagaattatttacaggagtagtgcctattttggtggagctggacggcgacgtgaacggacacaagttctcggtgtcgggcgagggcgagggcgacgccacctacgggaagcttaccctgaagttcatctgcactacgggtaagcttcccgtgccctggcccaccttagtgaccaccctcacctatggcgtgcagtgcttcagtcggtaccccgaccacatgaagcagcacgacttcttcaagtcggccatgcccgagggctatgtccaagagcgtaccatcttctttaaagacgatggcaattacaagacccgggccgaggtgaagttcgagggcgacaccttggtgaaccggatcgagctaaagggcatcgactttaaagaagatggtaacattcttggacataagctcgagtataattataactcgcacaatgtgtatatcatggccgacaagcagaagaacggaatcaaagtgaactttaagatccgtcacaacatcgaggacgggtccgttcagctcgccgaccactaccagcagaatacaccaataggagacggacccgtcttattgcccgacaatcactatttgagcacacagagtgcactatctaaggacccgaacgagaagcgggaccacatggtgctgctagagttcgtcaccgccgcgggtatcaccctcggcatggacgagctctacaaaagatcccgggacatcagccacggctttcctccagccgtggctgcgcaggacgacgggacgctgcccatgagctgcgcccaggagtccggcatggacaggcaccccgctgcctgtgccagtgccaggatcaatgtttag

SEQ ID NO: 662 - DNA, 855 bp, Artificial Sequence
  Modified Open Reading Frame
atggttagcaaaggagaagaattatttacaggggtagtgcctattttggtggagctggacggcgacgtgaacggacacaagttctcggtgtcgggcgagggcgagggcgacgccacctacgggaagcttaccctgaagttcatctgcactacgggtaagcttcccgtgccctggcccaccttagtgaccaccctcacctatggcgtgcagtgcttcagtcggtaccccgaccacatgaagcagcacgacttcttcaagtcggccatgcccgagggctatgtccaagagcgtaccatcttctttaaagacgatggcaattacaagacccgggccgaggtgaagttcgagggcgacaccttggtgaaccggatcgagctaaagggcatcgactttaaagaagatggtaacattcttggacataagctcgagtataattataactcgcacaatgtgtatatcatggccgacaagcagaagaacggaatcaaagtgaactttaagatccgtcacaacatcgaggacgggtccgttcagctcgccgaccactaccagcagaatacaccaataggagacggacccgtcttattgcctgacaatcactatttgtcaacacagagtgcactatctaaggacccgaacgagaagcgggaccacatggtgctgctagagttcgtcaccgccgcgggtatcaccctcggcatggacgagctctacaaaagatcccgggacatcagccacggctttcctccagccgtggctgcgcaggacgacgggacgctgcccatgagctgcgcccaggagtccggcatggacaggcaccccgctgcctgtgccagtgccaggatcaatgtgtaa

SEQ ID NO: 663 - DNA, 855 bp, Artificial Sequence
  Modified Open Reading Frame
atggttagcaaaggagaagaattatttacaggggtagtgcctattttggtggagctggacggcgacgtgaacggacacaagttctcggtgtcgggcgagggcgagggcgacgccacctacgggaagcttaccctgaagttcatctgcactacgggtaagcttcccgtgccctggcccaccttagtgaccaccctcacctatggcgtgcagtgcttcagtcggtaccccgaccacatgaagcagcacgacttcttcaagtcggccatgcccgagggctatgtccaagagcgtaccatcttctttaaagacgatggcaattacaagacccgggccgaggtgaagttcgagggcgacaccttggtgaaccggatcgagctaaagggcatcgactttaaagaagatggtaacattcttggacataagctcgagtataattataactcgcacaatgtgtatatcatggccgacaagcagaagaacggaatcaaagtgaactttaagatccgtcacaacatcgaggacgggtccgttcagctcgccgaccactaccagcagaatacaccaataggagacggacccgtcttattgcctgacaatcactatttgtcaacacagagtgcactatctaaggacccgaacgagaagcgggaccacatggtgctgctagagttcgtcaccgccgcgggtatcaccctcggcatggacgagctctacaaaagatcccgggacatcagccacggctttcctccagccgtggctgcgcaggacgacgggacgctgcccatgagctgcgcccaggagtccggcatggacaggcaccccgctgcctgtgccagtgccaggatcaatgtgtag

SEQ ID NO: 664 - DNA, 855 bp, Artificial Sequence
  Modified Open Reading Frame
atggtgtccaaaggagaggagctgttcaccggtgtggtgcctattctggtggagctggacggcgacgtgaacggacacaagttctcggtgagtggcgaaggtgaaggtgacgccacgtacgggaagcttaccctgaaattcatctgtaccacgggtaagcttcctgtgccgtggcccaccttggtgaccactctgacttacggcgtgcagtgcttcagtcggtaccccgaccacatgaagcagcacgacttcttcaagtctgccatgcctgaaggatacgtccaggaaaggacgatattcttcaaggacgatggcaattataagacgcgtgcggaggtcaagtttgaaggcgatacccttgtcaatagaattgagctcaagggtatcgacttcaaagaggacggtaatatactcgggcacaagctcgagtataattacaattcgcacaacgtctatataatggccgataagcagaagaatggcatcaaggtcaacttcaagattcgccacaacatcgaggacgggtccgttcagctcgccgaccactaccagcagaatacacccatcggtgacggccctgtccttttgccggacaaccattatctgtccacgcagtcagcgctgtcgaaggacccgaatgagaagcgcgaccatatggttcttctagagttcgtcactgccgcagggatcaccctcggcatggacgagctctacaagcgtagtcgcgacatctcacacgggttcccgccagcggtggctgcgcaggacgatggcacgttgccgatgagctgcgcgcaggagtccggcatggatagacatcctgccgcctgcgccagcgctcggatcaacgtgtaa

SEQ ID NO: 665 - DNA, 855 bp, Artificial Sequence
  Modified Open Reading Frame
atggtgtccaagggcgaagagctgttcacaggggtggttcctatactggtggagttggacggcgacgtgaacggccacaagttttctgtgagtggtgagggcgaaggcgacgccacctatggcaagctgaccctgaagttcatctgcaccacgggcaaactacccgtgccctggcccaccctggtcaccaccctgacctacggagtccagtgcttctctcgatatcccgaccacatgaagcagcacgacttcttcaagtcagccatgcccgagggctatgtccaggagcgtaccatcttctttaaggacgacggaaactataaaacgagggccgaggtgaagttcgaaggagacaccctggtcaatcgtattgagttgaagggcatcgactttaaagaggatggtaacatccttggacacaaactggagtacaactataacagccataacgtttacatcatggccgacaaacaaaaaaatgggatcaaggtaaactttaaaatccgtcacaacatcgaagacggcagcgtgcagctcgccgaccactaccagcagaacacacccatcggagacggtcccgttctgctgcccgacaaccactacctaagcacgcaatcagccctgtcaaaggaccccaacgagaagagggaccatatggtgctgcttgagttcgtcaccgccgccgggatcaccctgggcatggatgagctttataagcgcagccgtgacatcagccacggcttcccgccggcggtggccgcgcaggacgacgggacgctgcccatgagctgcgcccaagagagcggcatggacagacaccccgcggcctgtgcctctgcgcgtataaacgtgtag

SEQ ID NO: 666 - DNA, 855 bp, Artificial Sequence
  Modified Open Reading Frame
atggttagcaaaggagaagaattatttacaggggtggtgcctattttggtggagctggacggcgacgtgaacggacacaagttctcggtgtcgggcgagggcgagggcgacgccacctacgggaagcttaccctgaagttcatctgcactacgggtaagcttcccgtgccctggcccaccttagtgaccaccctcacctatggcgtgcagtgcttcagtcggtaccccgaccacatgaagcagcacgacttcttcaagtcggccatgcccgagggctatgtccaagagcgtaccatcttctttaaagacgatggcaattacaagacccgggccgaggtgaagttcgagggcgacaccttggtgaaccggatcgagctaaagggcatcgactttaaagaagatggtaacattcttggacataagctcgagtataattataactcgcacaatgtgtatatcatggccgacaagcagaagaacggaatcaaagtgaactttaagatccgtcacaacatcgaggacgggtccgttcagctcgccgaccactaccagcagaatacaccaataggagacggacccgtcttattgcccgacaatcactatttgtcaacacagagtgcactatctaaggacccgaacgagaagcgggaccacatggtgctgctagagttcgtcaccgccgcgggtatcaccctcggcatggacgagctctacaaaagatcccgggacatcagccacggctttcctccagccgtggctgcgcaggacgacgggacgctgcccatgagctgcgcccaggagtccggcatggacaggcaccccgctgcctgtgccagtgccaggatcaatgtgtag

SEQ ID NO: 667 - DNA, 855 bp, Artificial Sequence
  Modified Open Reading Frame
atggtgtccaaaggagaggagctgttcaccggtgtggtgcctattctggtggagctggacggcgacgtgaacggacacaagttctcggtgagtggcgaaggtgaaggtgacgccacgtacgggaagcttaccctgaaattcatctgtaccacgggtaagcttcccgtgccgtggcccaccttggtgaccactctgacttacggcgtgcagtgcttcagtcggtaccccgaccacatgaagcagcacgacttcttcaagtctgccatgcctgaaggatacgtccaggaaaggacgatattcttcaaggacgatggcaattataagacgcgtgcggaggtcaagtttgaaggcgatacccttgtcaatagaattgagctcaagggtatcgacttcaaagaggacggtaatatactcgggcacaagctcgagtataattacaattcgcacaacgtctatataatggccgataagcagaagaatggcatcaaggtcaacttcaagattcgccacaacatcgaggacgggtccgttcagctcgccgaccactaccagcagaatacacccatcggtgacggccctgtccttttgccggacaaccattatctgtccacgcagtcagcgctgtcgaaggacccgaatgagaagcgcgaccatatggttcttctagagttcgtcactgccgcagggatcaccctcggcatggacgagctctacaagcgtagtcgcgacatctcacacgggttcccgccagcggtggctgcgcaggacgatggcacgttgccgatgagctgcgcgcaggagtccggcatggatagacatcctgccgcctgcgccagcgctcggatcaacgtgtaa

SEQ ID NO: 668 - DNA, 855 bp, Artificial Sequence
  Modified Open Reading Frame
atggtgtccaagggcgaagagcttttcacaggggtggttcctatactggtggagttggacggcgacgtgaacggccacaagttttctgtgagtggtgagggcgaaggcgacgccacctatggcaagctgaccctgaagttcatctgcaccacgggcaaactacccgtgccctggcccaccctggtcaccaccctgacctacggagtccagtgcttctctcgatatcccgaccacatgaagcagcacgacttcttcaagtcagccatgcccgagggctatgtccaggagcgtaccatcttctttaaggacgacggtaactataaaacgagggccgaggtgaagttcgaaggagacaccctggtcaatcgtattgagttgaagggcatcgactttaaagaggatggtaacatccttggacacaaactggagtacaactataacagccataacgtttacatcatggccgacaaacaaaaaaatgggatcaaggtaaactttaaaatccgtcacaacatcgaagacggcagcgtgcagctcgccgaccactaccagcagaacacacccatcggagacggtcccgttctgctgcccgacaaccactacctaagcacgcaatcagccctgtcaaaggaccccaacgagaagagggaccatatggtgctgcttgagttcgtcaccgccgccgggatcaccctgggcatggatgagctttataagcgcagccgtgacatcagccacggcttcccgccggcggtggccgcgcaggacgacgggacgctgcccatgagctgcgcccaagagagcggcatggacagacaccccgcggcctgtgcctctgcgcgtataaacgtgtag

SEQ ID NO: 669 - DNA, 855 bp, Artificial Sequence
  Modified Open Reading Frame
atggtgagcaaaggagaagagttatttaccggcgtggtgcctattctggtggagctggacggcgacgtgaacggacacaagttctcggtgagtggcgaaggtgaaggcgacgccacgtacgggaagcttaccctgaaattcatctgtaccacgggtaagcttcctgtaccgtggccgaccttggtgaccactctgacttatggcgtgcagtgcttcagtcggtaccccgaccacatgaagcagcacgacttcttcaagtcggccatgcctgaaggatatgtccaggaaaggaccatattcttcaaggatgacggcaattataagacgcgtgcggaagtcaagtttgaaggcgatacccttgtcaatagaattgagctcaagggtatcgacttcaaagaggacggtaatatactcgggcacaagctcgagtataattacaattcccacaacgtctatataatggccgacaagcagaagaatggcatcaaggtcaacttcaagattcgccacaacatcgaggacgggtccgttcagctcgccgaccactaccagcagaatacgcccattggtgacggcccagtgttactgccggacaaccattatcttagcacgcagtcagcgctgtcgaaggacccgaatgagaagcgcgaccatatggttcttctagagttcgtcactgccgcagggatcaccctcggcatggacgagctctacaagcgtagtcgcgacatctcacacgggttcccgccagcggtggctgcgcaagatgatgggacgttgccgatgagctgcgcgcaggagtccggcatggatagacatcctgccgcctgcgccagcgctcggatcaacgtctaa

SEQ ID NO: 670 - DNA, 855 bp, Artificial Sequence
  Modified Open Reading Frame
atggtatcaaaaggggaggaactcttcacgggcgtcgttcccatcctcgtggaactcgacggagacgtgaacggacataagttcagcgtctccggcgagggcgagggtgacgccacgtacgggaagcttaccctgaagtttatatgtactacgggtaagcttcccgtaccgtggcccaccctcgtcacgacgctaacttatggcgtccaatgcttcagtcggtaccccgaccacatgaagcagcacgacttttttaagtcggctatgcccgagggttatgtgcaggagcgcaccatcttcttcaaagatgatggtaattataaaactcgggcagaggtgaagtttgaaggcgataccctggtcaatcggattgagcttaagggtatcgacttcaaagaggatgggaacattttaggccacaagcttgaatacaattacaacagccataatgtgtacattatggccgataagcagaagaatggtatcaaggtgaatttcaagattcgccataacatagaggacgggtccgtccagcttgctgatcactatcagcaaaatacaccgataggggacggacccgtcctcttgcctgataaccattacctgagtactcagtctgctctatcgaaggaccccaacgagaagagggaccacatggtcctcctcgagttcgtcaccgcagcgggaataacgctggggatggacgaactctacaaacgttcccgtgacattagtcacgggttccctcccgctgtcgctgcacaagacgatgggacccttcccatgtcttgtgcacaagagagcgggatggaccggcatcctgccgcctgcgcctcggcgcggataaacgtttga

SEQ ID NO: 671 - DNA, 855 bp, Artificial Sequence
  Modified Open Reading Frame
atggtgtcgaaaggagaggagctatttactggagtagttccgatactggtcgaattggacggcgacgtgaacggacacaagttctcggtgagtggtgagggtgaaggtgatgccacatatggcaagctgaccctgaagttcatatgcacgacgggcaagttaccggtgccgtggcccaccctggtcaccaccctgacctacggagtccagtgcttctctcggtatccggatcatatgaaacagcatgacttcttcaagagtgctatgcctgaaggttatgtccaggagcgtaccatcttctttaaagacgatggtaactacaaaacgagggccgaggtgaagttcgaaggagacaccctggtcaatcgtattgagttgaagggcatcgactttaaagaagatggtaacatccttggacataagcttgagtacaactataacagtcataatgtttacataatggcggataaacagaagaatggcatcaaggtaaactttaaaatccgtcataacattgaagacggcagcgtgcagttggcggatcattaccagcaaaacacacccataggagacggtcccgttctgttgccggacaaccactacctaagtacgcaatcagccctgtcaaaggatcctaacgagaagagggaccatatggtgctgcttgagtttgtcaccgccgccgggatcaccctgggcatggatgagctttataagcgcagccgtgacatcagccacggcttcccgccggcggtggccgcgcaggacgacgggaccctgcccatgagctgtgcccaagagtccggcatggacagacaccccgccgcctgtgcgtctgcgcgtataaacgtgtga

SEQ ID NO: 672 - DNA, 855 bp, Artificial Sequence
  Modified Open Reading Frame
atggtaagcaaaggagaggaattgttcacgggtgttgtaccgatcctcgtggagctggatggtgacgtgaacggccacaagttcagcgtttctggtgaaggggaaggggatgcgacgtacgggaaactgacgttgaagttcatttgcaccaccggaaaactgcctgtcccgtggccgactctcgtcaccaccctgacctacggggttcagtgcttcagcagataccctgatcatatgaaacagcatgatttcttcaaaagtgccatgcccgaggggtacgtgcaggagagaacaatcttttttaaggacgacgggaactacaaaactagggcagaggtcaagtttgagggtgataccctcgtcaatagaattgagctcaagggcatcgacttcaaggaggatggcaacattttgggacacaagctggagtataattacaactctcataacgtttatatcatggcggacaaacagaagaacggtattaaggttaatttcaagatcaggcacaacatcgaagacgggagtgttcagctggctgaccactaccagcagaacacccctatcggcgatggcccggtcttgctacctgacaatcattacctttctactcagagtgcgctgtcaaaggatccaaacgagaagagagatcacatggtgctcctggagttcgtaaccgccgcaggaataaccctcgggatggatgagctgtacaagaggtcgagggacatatcgcacgggtttccacccgcagtggcagcccaggacgatggaaccctccccatgtcgtgcgctcaggagtccggaatggatcgtcatccggcggcttgcgcaagcgccaggatcaacgtgtga

SEQ ID NO: 673 - DNA, 855 bp, Artificial Sequence
  Modified Open Reading Frame
atggtaagtaaaggcgaggaactgttcacgggtgttgtaccgatcctcgtggagctggatggtgacgtgaacggccacaagttcagcgtttctggtgaaggggaaggggatgcgacgtacgggaaactgacgttgaagttcatttgcaccaccggaaaactgcctgtcccgtggccgactctcgtcaccaccctgacctacggggttcagtgcttcagcagataccctgatcatatgaaacagcatgatttcttcaaaagtgccatgcccgaggggtacgtgcaggagagaacaatcttttttaaggacgacgggaactacaaaactagggcagaggtcaagtttgagggtgataccctcgtcaatagaattgagctcaagggcatcgacttcaaggaggatggcaacattttgggacacaagctggagtataattacaactctcataacgtttatatcatggcggacaaacagaagaacggtattaaggttaatttcaagatcaggcacaacatcgaagacgggagtgttcagctggctgaccactaccagcagaacacccctatcggcgatggcccggtcttgctacctgacaatcattacctttctactcagagtgcgctgtcaaaggatccaaacgagaagagagatcacatggtgctcctggagttcgtaaccgccgcaggaataaccctcgggatggatgagctgtacaagaggtcgagggacatatcgcacgggtttccacccgcagtggcagcccaggacgatggaaccctccccatgtcgtgcgctcaggagtccggaatggatcgtcatccggcggcttgcgcaagcgccaggatcaacgtgtga

SEQ ID NO: 674 - DNA, 855 bp, Artificial Sequence
  Modified Open Reading Frame
atggtaagcaaaggagaagaattgttcacgggtgttgtaccgatcctcgtggagctggatggtgacgtgaacggccacaagttcagcgtttctggtgaaggggaaggggatgcgacgtacgggaaactgacgttgaagttcatttgcaccaccggaaaactgcctgtcccgtggccgactctcgtcaccaccctgacctacggggttcagtgcttcagcagataccctgatcatatgaaacagcatgatttcttcaaaagtgccatgcccgaggggtacgtgcaggagagaacaatcttttttaaggacgacgggaactacaaaactagggcagaggtcaagtttgagggtgataccctcgtcaatagaattgagctcaagggcatcgacttcaaggaggatggcaacattttgggacacaagctggagtataattacaactctcataacgtttatatcatggcggacaaacagaagaacggtattaaggttaatttcaagatcaggcacaacatcgaagacgggagtgttcagctggctgaccactaccagcagaacacccctatcggcgatggcccggtcttgctacctgacaatcattacctttctactcagagtgcgctgtcaaaggatccaaacgagaagagagatcacatggtgctcctggagttcgtaaccgccgcaggaataaccctcgggatggatgagctgtacaagaggtcgagggacatatcgcacgggtttccacccgcagtggcagcccaggacgatggaaccctccccatgtcgtgcgctcaggagtccggaatggatcgtcatccggcggcttgcgcaagcgccaggatcaacgtgtga

SEQ ID NO: 675 - DNA, 855 bp, Artificial Sequence
  Modified Open Reading Frame
atggtaagcaagggagaggagctgttcacgggtgtcgttccaatcttggtggagctggacggcgacgtcaacggacacaagtttagtgtgtccggagagggcgagggtgacgcaacgtatggtaagctgaccttgaagttcatctgcactaccggcaaactgcctgtgccgtggcccacgctcgtgacgacgcttacctacggagtacagtgcttcagtaggtaccccgatcacatgaagcagcacgacttctttaagagcgcgatgcccgagggctacgtccaggagcgtaccatcttctttaaggatgatggtaactataagacgcgggccgaggtgaagttcgagggcgacaccttggtcaaccggatcgagctcaagggcatcgattttaaagaggacgggaacatcctgggccacaaattggagtacaactacaacagccataatgtatacattatggctgacaagcagaagaacggtatcaaggtgaacttcaagatccgtcataacattgaggatggttcggtgcagctcgccgatcactaccagcagaacacgcccatcggcgatgggcctgttctgctgccggacaaccattacttgtccacccagagcgccctctccaaggaccctaacgaaaaacgggaccacatggtcctgcttgagttcgtgaccgccgccggcatcaccctgggcatggacgagctatataagaggtcccgtgatatcagccacggctttcctccagccgtggctgcacaagatgacgggacactgcctatgagctgtgcccaggagtcaggaatggatcgacacccggcagcgtgtgcaagcgctagaataaatgtgtga

SEQ ID NO: 676 - DNA, 855 bp, Artificial Sequence
  Modified Open Reading Frame
atggtaagcaagggagaggagctattcacgggtgtcgttccaatcttggtggagctggacggcgacgtcaacggacacaagtttagtgtgtccggagagggcgagggtgacgcaacgtatggtaagctgaccttgaagttcatctgcactaccggcaaactgcctgtgccgtggcccacgctcgtgacgacgcttacctacggagtacagtgcttcagtaggtaccccgatcacatgaagcagcacgacttctttaagagcgcgatgcccgagggctacgtccaggagcgtaccatcttctttaaggatgatggtaactataagacgcgggccgaggtgaagttcgagggcgacaccttggtcaaccggatcgagctcaagggcatcgattttaaagaggacgggaacatcctgggccacaaattggagtacaactacaacagccataatgtatacattatggctgacaagcagaagaacggtatcaaggtgaacttcaagatccgtcataacattgaggatggttcggtgcagctcgccgatcactaccagcagaacacgcccatcggcgatgggcctgttctgctgccggacaaccattacttgtccacccagagcgccctctccaaggaccctaacgaaaaacgggaccacatggtcctgcttgagttcgtgaccgccgccggcatcaccctgggcatggacgagctatataagaggtcccgtgatatcagccacggctttcctccagccgtggctgcacaagatgacgggacactgcctatgagctgtgcccaggagtcaggaatggatcgacacccggcagcgtgtgcaagcgctagaataaatgtgtga

SEQ ID NO: 677 - DNA, 855 bp, Artificial Sequence
  Modified Open Reading Frame
atggtaagcaagggagaggagttattcacgggtgtcgttccaatcttggtggagctggacggcgacgtcaacggacacaagtttagtgtgtccggagagggcgagggtgacgcaacgtatggtaagctgaccttgaagttcatctgcactaccggcaaactgcctgtgccgtggcccacgctcgtgacgacgcttacctacggagtacagtgcttcagtaggtaccccgatcacatgaagcagcacgacttctttaagagcgcgatgcccgagggctacgtccaggagcgtaccatcttctttaaggatgatggtaactataagacgcgggccgaggtgaagttcgagggcgacaccttggtcaaccggatcgagctcaagggcatcgattttaaagaggacgggaacatcctgggccacaaattggagtacaactacaacagccataatgtatacattatggctgacaagcagaagaacggtatcaaggtgaacttcaagatccgtcataacattgaggatggttcggtgcagctcgccgatcactaccagcagaacacgcccatcggcgatgggcctgttctgctgccggacaaccattacttgtccacccagagcgccctctccaaggaccctaacgaaaaacgggaccacatggtcctgcttgagttcgtgaccgccgccggcatcaccctgggcatggacgagctatataagaggtcccgtgatatcagccacggctttcctccagccgtggctgcacaagatgacgggacactgcctatgagctgtgcccaggagtcaggaatggatcgacacccggcagcgtgtgcaagcgctagaataaatgtgtga

SEQ ID NO: 678 - DNA, 855 bp, Artificial Sequence
  Modified Open Reading Frame
atggtaagcaagggagaggagttattcacgggtgtcgttccaatcttggtggagctggacggcgacgtcaacggacacaagtttagtgtgtccggagagggcgagggtgacgcaacgtatggtaagctgaccttgaagttcatctgcactaccggcaaactgcctgtgccgtggcccacgctcgtgacgacgcttacctacggagtacagtgcttcagtaggtaccccgatcacatgaagcagcacgacttctttaagagcgcgatgcccgagggctacgtccaggagcgtaccatcttctttaaggatgatggtaactataagacgcgggccgaggtgaagttcgagggcgacaccttggtcaaccggatcgagctcaagggcatcgattttaaagaggacgggaacatcctgggccacaaattggagtacaactacaacagccataatgtatacattatggctgacaagcagaagaacggtatcaaggtgaacttcaagatccgtcataacattgaggatggttcggtgcagctcgccgatcactaccagcagaacacgcccatcggcgatgggcctgttctgctgccggacaaccattacttgtccacccagagcgccctctccaaggaccctaacgaaaaacgggaccacatggtcctgcttgagttcgtgaccgccgccggcatcaccctgggcatggacgagctatataagaggtcccgtgatatcagccacggctttcctccagccgtggctgcacaagatgacgggacactgcctatgagctgtgcccaggagtcaggaatggatcgacacccggcagcgtgtgcaagcgctagaataaatgtttga

SEQ ID NO: 679 - DNA, 855 bp, Artificial Sequence
  Modified Open Reading Frame
atggtaagcaagggagaggaactcttcacgggtgtcgttccaatcttggtggagctggacggcgacgtcaacggacacaagtttagtgtgtccggagagggcgagggtgacgcaacgtatggtaagctgaccttgaagttcatctgcactaccggcaaactgcctgtgccgtggcccacgctcgtgacgacgcttacctacggagtacagtgcttcagtaggtaccccgatcacatgaagcagcacgacttctttaagagcgcgatgcccgagggctacgtccaggagcgtaccatcttctttaaggatgatggtaactataagacgcgggccgaggtgaagttcgagggcgacaccttggtcaaccggatcgagctcaagggcatcgattttaaagaggacgggaacatcctgggccacaaattggagtacaactacaacagccataatgtatacattatggctgacaagcagaagaacggtatcaaggtgaacttcaagatccgtcataacattgaggatggttcggtgcagctcgccgatcactaccagcagaacacgcccatcggcgatgggcctgttctgctgccggacaaccattacttgtccacccagagcgccctctccaaggaccctaacgaaaaacgggaccacatggtcctgcttgagttcgtgaccgccgccggcatcaccctgggcatggacgagctatataagaggtcccgtgatatcagccacggctttcctccagccgtggctgcacaagatgacgggacactgcctatgagctgtgcccaggagtcaggaatggatcgacacccggcagcgtgtgcaagcgcgcgtataaacgtgtga

SEQ ID NO: 680 - DNA, 855 bp, Artificial Sequence
  Modified Open Reading Frame
atggtttctaaaggcgaggagctgttcaccggtgtggtgcctattctggtggagctggacggcgacgtgaacggacacaagttctcggtgagtggcgaaggtgaaggcgacgccacgtacgggaagcttaccctgaaattcatctgtaccacgggtaagcttcccgtaccgtggccgaccttggtgaccactctgacttatggcgtgcagtgcttcagtcggtaccccgaccacatgaagcagcacgacttcttcaagtcggccatgcctgaaggatatgtccaggaaaggaccatattcttcaaggatgacggcaattataagacgcgtgcggaagtcaagtttgaaggcgatacccttgtcaatagaattgagctcaagggtatcgacttcaaagaggacggtaatatactcgggcacaagctcgagtataattacaattcccacaacgtctatataatggccgacaagcagaagaatggcatcaaggtcaacttcaagattcgccacaacatcgaggacgggtccgttcagctcgccgaccactaccagcagaatacacccatcggtgacggccccgtattgttgcccgacaatcattatcttagcacgcagtcagcgctgtcgaaggacccgaatgagaagcgcgaccatatggttcttttagagttcgtcactgccgcagggatcaccctcggcatggacgagctctataagcgtagtcgcgacatctcacacgggttcccgccagcggtggctgcgcaagatgatgggacgttgccgatgagctgcgcgcaggagtccggcatggatagacatcctgccgcctgcgccagcgctcggatcaacgtctaa

SEQ ID NO: 681 - DNA, 855 bp, Artificial Sequence
  Modified Open Reading Frame
atggtttccaagggcgaggagctgttcacaggcgtggtgcctatcctggtggagctggacggcgacgtgaacggccacaagtttagcgtgtccggagagggcgaaggcgatgccacctatggcaagctgaccctgaagttcatctgcaccaccggcaaactgcccgtgccctggcccaccctcgtgaccacgctgacttatggagtccagtgcttcagcagataccccgaccacatgaagcagcacgacttctttaagtcagcgatgcccgagggctacgtgcaggaaagaaccatcttctttaaggatgatggtaactataagaccagagccgaggtgaagttcgagggagacaccctggtgaacagaatcgagctgaagggcatcgacttcaaagaggatggcaacatcctcggccataagctggagtacaactacaacagccacaatgtgtacattatggccgacaaacagaagaacgggatcaaggtgaactttaagatcagacacaatatcgaggacggcagcgtgcagctcgccgatcactaccagcagaacacaccgatcggcgacggccccgtgctgctgcccgataaccattatctgagcactcagagcgccctttccaaggaccctaacgagaagagagatcacatggtgctgctcgagttcgtgaccgccgccggcatcaccctgggcatggacgagctctacaagaggtcccgcgacataagccacggctttcctccagccgtggccgcccaagacgacgggacccttcccatgagctgcgcccaggagtccggcatggataggcaccccgccgcctgtgccagcgcccggatcaatgtgtaa

SEQ ID NO: 682 - DNA, 855 bp, Artificial Sequence
  Modified Open Reading Frame
atggtgtccaagggcgaggaactattcactggggtagtgccgatacttgttgagcttgacggtgacgtgaacggccacaaatttagcgtcagcggggaaggtgaaggggatgcgacttacggcaaactgaccttgaagttcatatgtactacagggaagttgcccgttccctggccgaccctcgtcaccacgctgacttacggagtccagtgcttcagtcggtaccccgaccacatgaagcaacatgacttcttcaagtcggcgatgccggaggggtacgtccaggagcggacaatcttctttaaagacgatgggaactacaagactcgtgcggaggtgaagtttgagggtgacactcttgtgaatcgaatagagctcaaaggtatcgacttcaaagaggacggcaatattctaggccataagttggagtacaattacaacagccataacgtctacatcatggcggacaagcagaagaatggtatcaaagtgaactttaagattcgtcacaacatagaggacggctctgtccaactcgccgaccactaccaacagaataccccgataggcgacggacccgttttactgcccgacaatcactatctaagcacccagtccgctctgtcaaaggaccccaacgagaagcgggaccacatggtcctgctggagttcgtgacggcggcgggtattacgttagggatggacgagctgtataaacgttcgcgcgatatcagccatggttttccgccggcagtcgcagcccaagacgacggcaccttgcccatgtcgtgcgctcaggagtcgggcatggaccgccaccccgcagcatgtgccagcgctcgcatcaatgtatag

SEQ ID NO: 683 - DNA, 855 bp, Artificial Sequence
  Modified Open Reading Frame
atggtgtccaagggcgaggagctgtttaccggggttgtgcccatcttggtggagctggacggtgatgtcaatggccataagttcagcgtcagcggggagggagaaggcgacgcgacgtacgggaagctgacgttgaaattcatctgcacgacgggcaaactgcccgtcccgtggccgactctcgttaccaccctcacgtacggcgtgcagtgcttctcccgctaccctgatcacatgaagcagcatgacttcttcaaaagtgctatgcccgaaggttatgtgcaggagaggaccatcttctttaaggacgatggcaactacaagacccgggcagaggtcaaatttgagggagacacgctcgtgaaccggattgagcttaagggcattgacttcaaagaggacggcaacatccttgggcacaaactcgagtacaactacaactcgcataacgtgtacattatggcggacaagcagaagaacggtatcaaagtaaactttaaaatacgacacaacattgaggacgggagcgtacagctggctgaccactatcagcagaatacacctatcggggacggaccagtcctcctccccgataatcattacctgagtactcagtcagctctctccaaggaccccaatgagaagagagatcacatggtgctgttggagttcgtgacggcggcggggatcacgctggggatggacgagctctacaaaaggtcgcgcgacatctctcacgggttcccccccgccgtcgcagcccaagacgacggcaccctgccgatgtcgtgtgctcaggagagtggtatggaccgtcatcctgctgcgtgcgccagtgcacgtataaatgtgtga

SEQ ID NO: 684 - DNA, 855 bp, Artificial Sequence
  Modified Open Reading Frame
atggtgtccaagggcgaggaattgttcacgggtgttgtaccgatcctcgtggagctggatggtgacgtgaacggccacaagttcagcgtttctggtgaaggggaaggggacgccacgtacgggaaactgacgctgaagttcatttgcaccaccggaaaactgcctgtcccgtggccgactctcgtcaccaccctgacctacggggttcagtgcttcagcagataccctgatcatatgaaacagcatgatttcttcaaaagtgccatgcccgaggggtacgtgcaggagagaacaatcttttttaaggacgacgggaactataaaactagggcagaggtcaagtttgagggtgataccctcgtcaatagaattgagctcaagggcatcgacttcaaggaggatggcaacattttgggacacaagctggagtataattacaactctcataacgtttatatcatggcggacaaacagaagaacggtattaaggttaatttcaagatcaggcacaacatcgaagacgggagtgttcagctggctgaccactaccagcagaacacccctatcggcgatggcccggtcttgctacctgacaaccattacctttctactcagagtgcgctgtcaaaggatccaaacgagaagagagatcacatggtgctcctggagttcgtaaccgccgcaggaataaccctcgggatggatgagctgtacaagaggtcgagggacatatcgcacgggtttccacccgcagtagcagcccaggacgatggaaccctccccatgtcgtgcgctcaggagtccggaatggatcgtcatccggcggcttgcgcaagcgccaggatcaacgtgtga

SEQ ID NO: 685 - DNA, 855 bp, Artificial Sequence
  Modified Open Reading Frame
atggtgtccaagggcgaggaactgtttactggcgttgtgccaatactggtcgagcttgacggtgacgtcaatggtcacaagtttagcgtcagcggtgagggcgagggcgatgccacctacggcaagctgacattgaagttcatatgtaccactggaaagttaccagttccgtggcccaccctagtaactaccctcacctatggagtgcaatgcttttcgaggtaccccgatcacatgaagcagcacgacttcttcaaatccgccatgcctgagggttacgtccaagagagaacaatattctttaaggatgatggcaattacaaaacgcgtgccgaggtgaagttcgagggtgatacgctcgtgaatcggattgaactcaagggcattgacttcaaagaggacggtaatatactcggccacaaactggaatacaattataactcgcacaacgtctatatcatggctgataagcagaagaatggcatcaaggtgaactttaagatccggcataatatcgaggatggaagcgtgcaacttgcggaccactatcaacagaatacgcctatcggggacggaccagtcctcctccctgataatcattatcttagtacgcaaagcgcgttgtccaaagatcccaacgagaagcgggatcatatggttctccttgagtttgtcactgctgctggtatcacccttggtatggacgagttatataaacggtccagggacatatcgcatggatttccgcctgcggtggcggcacaggacgacggcaccttaccgatgtcgtgtgctcaggaatcagggatggaccgtcatcctgcggcctgtgccagcgctaggataaacgtgtga

SEQ ID NO: 686 - DNA, 855 bp, Artificial Sequence
  Modified Open Reading Frame
atggtgtccaagggcgaggaactctttacaggggtagtaccgatcctggtcgagcttgacggcgacgtgaatggccacaagtttagcgtcagcggcgaaggtgaaggggatgccacctatgggaaactcactctgaagttcatctgcaccactgggaagctgccagtaccttggccgaccctagtgacgacgctgacctacggagtgcaatgctttagcaggtaccctgatcacatgaagcagcatgactttttcaagtcggccatgccggaaggctacgtccaggaacggactatcttttttaaagatgacggcaactataagacgcgtgctgaggtaaagttcgagggagacacgctggtcaaccgcattgagttgaagggtattgactttaaagaggatggcaatattctgggtcacaaacttgagtataactataatagtcataacgtttacatcatggctgacaaacagaagaatggcatcaaggttaactttaagatccgtcacaacatcgaggatggcagcgtgcaactcgccgatcattaccaacagaacactcctataggtgacggtccagtcttgcttcctgacaatcactatctctcgacgcagagtgccctctcaaaggaccctaatgagaagcgggatcacatggtgctcctggagtttgtgacggcagcggggataacactcggtatggacgagctctacaaaagaagccgggacatctcgcacgggtttcctcccgcggtggcggcgcaagatgacgggacactaccgatgagctgtgctcaggagagtggtatggacaggcaccctgcggcgtgtgctagtgccaggatcaacgtctga

SEQ ID NO: 687 - DNA, 855 bp, Artificial Sequence
  Modified Open Reading Frame
atggtgtccaaaggagaggagctgttcaccggtgtggtgcctattctggtggagctggacggcgacgtgaacggacacaagttctcggtgagtggcgaaggagagggcgacgcaacgtacgggaagcttaccctgaaattcatctgtaccacgggtaagcttcccgtaccgtggccgaccttggtgaccactctgacttatggcgtgcagtgcttcagtcggtaccccgaccacatgaagcagcacgacttcttcaagtcggccatgcccgaagggtatgtccaagagcgtaccatcttctttaaagacgatggcaattacaagacccgggccgaggtgaagttcgagggcgacaccttggtgaaccggatcgagctgaagggcatcgactttaaggaagatggtaacattcttggacataagttggagtacaactacaactcacacaatgtgtatatcatggccgacaagcagaagaatggcatcaaggtcaacttcaagattcgccacaacatcgaggacgggtccgttcagctcgccgaccactaccagcagaatacacccatcggtgacggccctgtccttttgccggacaaccattatctgtccacgcagtcagcgctgtcgaaggacccgaatgagaagcgcgaccacatggtgcttctagagttcgtcactgccgcagggatcaccctcggcatggacgagctctacaagcgtagtcgcgacatctcacacgggttcccgccagcggtggctgcgcaggacgatggcacgttgccgatgagctgcgcgcaggagtccggcatggatagacatcctgccgcctgcgccagcgctcggatcaacgtgtaa

SEQ ID NO: 688 - DNA, 855 bp, Artificial Sequence
  Modified Open Reading Frame
atggtgtccaagggcgaggagttatttacaggtgttgtacctattctagttgagttggacggagatgtcaacggtcataagttttcagtctctggagagggagaaggtgacgcaacgtatggcaagctaactttaaaattcatctgtactactggtaagctgcccgttccatggccgacgctcgttactacacttacctatggggtacagtgcttttcaagatatcctgatcacatgaagcagcacgatttcttcaaaagcgctatgcccgaggggtatgtgcaggaacgaacgatcttctttaaggacgacggcaactacaagacacgtgctgaggtaaagttcgagggcgatacgttggtcaaccgtatcgagctcaagggaatagactttaaggaggatggcaatatccttggacataagctagaatacaattacaactcacacaatgtttatatcatggccgataagcagaagaatgggatcaaagtcaatttcaagatcagacataatatcgaagatggctccgtccagctcgccgaccactaccagcagaacacccctattggcgatggacctgttttgttgcccgacaatcactacctcagtacccaaagcgctctatcgaaagatccgaacgagaagagagatcatatggttctgttggagttcgtgaccgctgcgggtattacgctagggatggacgagctatataagaggtcccgcgacattagccatggttttccgccagcggtcgccgcgcaggacgatggcaccttacctatgtcgtgtgctcaggaaagtggcatggatcgccatcctgctgcttgtgccagtgctagaatcaatgtgtga

SEQ ID NO: 689 - DNA, 855 bp, Artificial Sequence
  Modified Open Reading Frame
atggtgtccaaaggagaggagctgttcaccggtgtggtgcctattctggtggagctggacggcgacgtgaacggacacaagttctcggtgagtggcgaaggtgaaggcgacgccacgtacgggaagcttaccctgaaattcatctgtaccacgggtaagcttcccgtaccgtggccgaccttggtgaccactctgacttacggcgtgcagtgcttcagtcggtaccccgaccacatgaagcagcacgacttcttcaagtcggctatgcccgaagggtatgtccaagagcgtaccatcttctttaaagacgatggcaattacaagacccgggccgaggtgaagttcgagggcgacaccttggtgaaccggatcgagctgaagggcatcgactttaaggaagatggtaacattcttggacataagttggagtacaactacaatagccataatgtgtacattatggccgataagcagaagaatggcatcaaggtcaacttcaagattcgccacaacatcgaggacgggtccgttcagctcgccgaccactaccagcagaatacacccatcggtgacggccctgtccttttgccggacaaccattatctgtccacgcagtcagcgctgtcgaaggacccgaatgagaagcgcgaccacatggtgcttctagagttcgtcactgccgcagggatcaccctcggcatggacgagctctacaagcgtagtcgcgacatctcacacgggttcccgccagcggtggctgcgcaggacgatggcacgttgccgatgagctgcgcgcaggagtccggcatggatagacatcctgccgcctgcgccagcgctcggatcaacgtgtaa

SEQ ID NO: 690 - DNA, 855 bp, Artificial Sequence
  Modified Open Reading Frame
atggtgtccaaaggagaggagctgttcaccggtgtggtgcctattctggtggagctggacggcgacgtgaacggacacaagttctcggtgagtggcgaaggtgaaggcgacgccacgtacgggaagcttaccctgaaattcatctgtaccacgggtaagcttcctgtaccgtggccgaccttggtgaccactctgacttacggcgtgcagtgcttcagtcggtaccccgaccacatgaagcagcacgacttcttcaagtcggctatgcccgaagggtatgtccaagagcgtaccatcttctttaaagacgatggcaattacaagacccgggccgaggtgaagttcgagggcgacaccttggtgaaccggatcgagctgaagggcatcgactttaaggaagatggtaacattcttggacataagttggagtacaactacaatagccataatgtgtacattatggccgataagcagaagaatggcatcaaggtcaacttcaagattcgccacaacatcgaggacgggtccgttcagctcgccgaccactaccagcagaatacacccatcggtgacggccctgtccttttgccggacaaccattatctgtccacgcagtcagcgctgtcgaaggacccgaatgagaagcgcgaccacatggtgcttctagagttcgtcactgccgcagggatcaccctcggcatggacgagctctacaagcgtagtcgcgacatctcacacgggttcccgccagcggtggctgcgcaggacgatggcacgttgccgatgagctgcgcgcaggagtccggcatggatagacatcctgccgcctgcgccagcgctcggatcaacgtgtaa

SEQ ID NO: 691 - DNA, 855 bp, Artificial Sequence
  Modified Open Reading Frame
atggtttctaaaggcgaggagctgttcaccggtgtggtgcctattctggtggagctggacggcgacgtgaacggacacaagttctcggtgagtggcgaaggtgaaggcgacgccacgtacgggaagcttaccctgaaattcatctgtaccacgggtaagcttcccgtaccgtggccgaccttggtgaccactctgacttacggcgtgcagtgcttcagtcggtaccccgaccacatgaagcagcacgacttcttcaagtcggctatgcccgaagggtatgtccaagagcgtaccatcttctttaaagacgatggcaattacaagacccgggccgaggtgaagttcgagggcgacaccttggtgaaccggatcgagctgaagggcatcgactttaaggaagatggtaacattcttggacataagttggagtacaactacaatagccataatgtgtacattatggccgataagcagaagaatggcatcaaggtcaacttcaagattcgccacaacatcgaggacgggtccgttcagctcgccgaccactaccagcagaatacacccatcggtgacggccccgtattgttgcccgacaatcattatcttagcacgcagtcagcgctgtcgaaggacccgaatgagaagcgcgaccacatggtgcttctagagttcgtcactgccgcagggatcaccctcggcatggacgagctctacaagcgtagtcgcgacatctcacacgggttcccgccagcggtggctgcgcaagatgatgggacgttgccgatgagctgcgcgcaggagtccggcatggatagacatcctgccgcctgcgccagcgctcggatcaacgtctaa

SEQ ID NO: 692 - DNA, 855 bp, Artificial Sequence
  Modified Open Reading Frame
atggtttctaaaggtgaggagctgttcaccggtgtggtgcctattctggtggagctggacggcgacgtgaacggacacaagttctcggtgagtggcgaaggtgaaggcgacgccacgtacgggaagcttaccctgaaattcatctgtaccacgggtaagcttcccgtaccgtggccgaccttggtgaccactctgacttatggcgtgcagtgcttcagtcggtaccccgaccacatgaagcagcacgacttcttcaagtcggccatgcctgaaggatatgtccaggaaaggaccatattcttcaaggatgacggcaattataagacgcgtgcggaagtcaagtttgaaggcgatacccttgtcaatagaattgagctcaagggtatcgacttcaaagaggacggtaatatactcgggcacaagctcgagtataattacaattcccacaacgtctatataatggccgacaagcagaagaatggcatcaaggtcaacttcaagattcgccacaacatcgaggacgggtccgttcagctcgccgaccactaccagcagaatacacccatcggtgacggccctgtattgttgcccgacaatcattatcttagcacgcagtcagcgctgtcgaaggacccgaatgagaagcgcgaccatatggttcttctagagttcgtcactgccgcagggatcaccctcggcatggacgagctctacaagcgtagtcgcgacatctcacacgggttcccgccagcggtggctgcgcaagatgatgggacgttgccgatgagctgcgcgcaggagtccggcatggatagacatcctgccgcctgcgccagcgctcggatcaacgtctaa

SEQ ID NO: 693 - DNA, 855 bp, Artificial Sequence
  Modified Open Reading Frame
atggtgtccaaaggagaggagctgttcaccggtgtggtgcctattctggtggagctggacggcgacgtgaacggacacaagttctcggtgagtggcgaaggtgaaggcgacgccacgtacgggaagcttaccctgaaattcatctgtaccacgggtaagcttcccgtgccgtggccgaccttggtgaccactctgacttatggcgtgcagtgcttcagtcggtaccccgaccacatgaagcagcacgacttcttcaagtcggccatgcctgaaggatatgtccaggaaaggaccatattcttcaaggatgacggcaattataagacgcgtgcggaagtcaagtttgaaggcgatacccttgtcaatagaattgagctcaagggtatcgacttcaaagaggacggtaatatactcgggcacaagctcgagtataattacaattcccacaacgtctatataatggccgacaagcagaagaatggcatcaaggtcaacttcaagattcgccacaacatcgaggacgggtccgttcagctcgccgaccactaccagcagaatacacccatcggtgacggccctgtccttttgccggacaaccattatctgtccacgcagtcagcgctgtcgaaggacccgaatgagaagcgcgaccatatggttcttctagagttcgtcactgccgcagggatcaccctcggcatggacgagctctacaagcgtagtcgcgacatctcacacgggttcccgccagcggtggctgcgcaggacgatggcacgttgccgatgagctgcgcgcaggagtccggcatggatagacatcctgccgcctgcgccagcgctcggatcaacgtgtaa

SEQ ID NO: 694 - DNA, 855 bp, Artificial Sequence
  Modified Open Reading Frame
atggtgtccaaaggagaggagctgttcaccggtgtggtgcctattctggtggagctggacggcgacgtgaacggacacaagttctcggtgagtggcgaaggagagggcgacgcaacgtacgggaagcttaccctgaaattcatctgtaccacgggtaagcttcctgtaccgtggccgaccttggtgaccactctgacttatggcgtgcagtgcttcagtcggtaccccgaccacatgaagcagcacgacttcttcaagtcggccatgcccgaagggtatgtccaagagcgtaccatcttctttaaagacgatggcaattacaagacccgggccgaggtgaagttcgagggcgacaccttggtgaaccggatcgagctgaagggcatcgactttaaggaagatggtaacattcttggacataagttggagtacaactacaactcacacaatgtgtatatcatggccgacaagcagaagaatggcatcaaggtcaacttcaagattcgccacaacatcgaggacgggtccgttcagctcgccgaccactaccagcagaatacacccatcggtgacggccctgtccttttgccggacaaccattatctgtccacgcagtcagcgctgtcgaaggacccgaatgagaagcgcgaccacatggtgcttctagagttcgtcactgccgcagggatcaccctcggcatggacgagctctacaagcgtagtcgcgacatctcacacgggttcccgccagcggtggctgcgcaggacgatggcacgttgccgatgagctgcgcgcaggagtccggcatggatagacatcctgccgcctgcgccagcgctcggatcaacgtgtaa

SEQ ID NO: 695 - DNA, 855 bp, Artificial Sequence
  Modified Open Reading Frame
atggtttctaaaggtgaggagctgttcaccggtgtggtgcctattctggtggagctggacggcgacgtgaacggacacaagttctcggtgagtggcgaaggtgaaggcgacgccacgtacgggaagcttaccctgaaattcatctgtaccacgggtaagcttcctgtaccgtggccgaccttggtgaccactctgacttacggcgtgcagtgcttcagtcggtaccccgaccacatgaagcagcacgacttcttcaagtcggctatgcccgaagggtatgtccaagagcgtaccatcttctttaaagacgatggcaattacaagacccgggccgaggtgaagttcgagggcgacaccttggtgaaccggatcgagctgaagggcatcgactttaaggaagatggtaacattcttggacataagttggagtacaactacaatagccataatgtgtacattatggccgataagcagaagaatggcatcaaggtcaacttcaagattcgccacaacatcgaggacgggtccgttcagctcgccgaccactaccagcagaatacacccatcggtgacggccctgtattgttgcccgacaatcattatcttagcacgcagtcagcgctgtcgaaggacccgaatgagaagcgcgaccacatggtgcttctagagttcgtcactgccgcagggatcaccctcggcatggacgagctctacaagcgtagtcgcgacatctcacacgggttcccgccagcggtggctgcgcaagatgatgggacgttgccgatgagctgcgcgcaggagtccggcatggatagacatcctgccgcctgcgccagcgctcggatcaacgtctaa

SEQ ID NO: 696 - DNA, 855 bp, Artificial Sequence
  Modified Open Reading Frame
atggtttctaaaggcgaggaactgttcaccggtgtggtgcctattctggtggagctggacggcgacgtgaacggacacaagttctcggtgagtggcgaaggtgaaggcgacgccacgtacgggaagcttaccctgaaattcatctgtaccacgggtaagcttcctgtaccgtggccgaccttggtgaccactctgacttacggcgtgcagtgcttcagtcggtaccccgaccacatgaagcagcacgacttcttcaagtcggctatgcccgaagggtatgtccaagagcgtaccatcttctttaaagacgatggcaattacaagacccgggccgaggtgaagttcgagggcgacaccttggtgaaccggatcgagctgaagggcatcgactttaaggaagatggtaacattcttggacataagttggagtacaactacaatagccataatgtgtacattatggccgataagcagaagaatggcatcaaggtcaacttcaagattcgccacaacatcgaggacgggtccgttcagctcgccgaccactaccagcagaatacacccatcggtgacggtcccgtattgttgcccgacaatcattatcttagcacgcagtcagcgctgtcgaaggacccgaatgagaagcgcgaccacatggtgcttctagagttcgtcactgccgcagggatcaccctcggcatggacgagctctacaagcgtagtcgcgacatctcacacgggttcccgccagcggtggctgcgcaagatgatgggacgttgccgatgagctgcgcgcaggagtccggcatggatagacatcctgccgcctgcgccagcgctcggatcaacgtctaa

SEQ ID NO: 697 - DNA, 855 bp, Artificial Sequence
  Modified Open Reading Frame
atggtatcaaaaggagaagagctgtttaccggcgttgttcctatcctggtggagctggacggcgacgtgaacggccacaagttcagcgtgtccggtgagggcgagggcgatgcgacctatgggaaactgaccttgaagttcatctgtactaccggtaaactgcctgtgccgtggcccacgctggtgaccaccctgacttacggagtccaatgcttcagtcggtaccccgaccatatgaagcagcacgacttcttcaagtccgccatgcccgagggctacgtgcaggaaagaaccatcttctttaaggacgacggtaactataagactagggccgaggtcaagttcgagggtgacaccctcgtgaaccgaatcgagctgaagggcatcgacttcaaagaggatggtaatatcctgggccataagctggagtataattacaacagccataatgtatatattatggccgacaagcagaagaacggtattaaggtgaactttaagatcagacataacatagaggacggcagcgtgcagctcgccgatcactaccagcagaacacgcccatcggcgatgggcctgtactgctgccagataaccattatctgagcacgcagagcgccctctccaaggaccctaacgagaagagagatcacatggtgctgctcgagttcgttaccgccgccggcatcaccctgggtatggacgagctgtataagaggtcccgagacatcagccacggctttcctccagccgtggccgcacaggacgacgggactctgcccatgagctgcgctcaggagtccggcatggacagacatcccgctgcctgtgccagcgcacggattaatgtgtaa

SEQ ID NO: 698 - DNA, 855 bp, Artificial Sequence
  Modified Open Reading Frame
atggtttctaaaggcgaagaactctttactggagttgttccgatcctggtcgagttagacggagatgtgaatggtcacaaattctccgtctcgggcgagggcgagggggatgccacgtacggtaagcttacgcttaagtttatctgtacgactggcaagctccccgtgccctggcccacgttagtgaccacactgacgtacggcgtgcagtgcttcagtcggtatcccgaccatatgaagcagcacgacttcttcaaatctgccatgcccgaggggtatgtgcaggagaggaccatcttttttaaagatgacggaaactacaagacgcgggctgaggtgaaatttgagggggataccctcgtcaaccgcatagaattgaaaggaatcgattttaaggaggatggcaatatactcgggcataagctcgagtataactacaacagccataatgtatacattatggctgataagcagaagaacgggatcaaggtcaacttcaagatccgtcacaatattgaggacggatctgtgcagttggctgatcactatcagcagaatactccgataggagatggtcccgttcttctgccagataaccattatctgagcacccagtccgcgttgagtaaggatccgaacgaaaagcgggaccacatggtcctgcttgagttcgtgacggcggcgggaatcacccttggcatggacgagctgtataagcggtctcgtgacataagccatgggttcccgcctgccgtcgcggcgcaggacgacggcacgctgccgatgtcctgcgcgcaggagtcgggaatggaccgacatcctgcggcttgtgcctcggccaggatcaatgtttag

SEQ ID NO: 699 - DNA, 855 bp, Artificial Sequence
  Modified Open Reading Frame
atggtaagcaaaggagaggagttattcacgggcgtggtgcccatcctagttgagctggatggggacgttaatggccacaaatttagcgtctcgggagaaggagagggcgatgcgacctatgggaagttgaccttgaagtttatctgtaccacaggtaaacttccggtcccgtggcctacgttagtgacaacactgacgtatggcgtgcagtgcttctcgcggtatccagaccatatgaagcaacatgacttctttaagtctgcgatgcccgaggggtacgtgcaggagcgtaccatcttctttaaggacgacgggaattacaagacccgtgctgaagtcaagttcgaaggcgatacgctggtaaatcgcatcgagctaaaggggattgacttcaaagaagatggtaacatcctcggccataagttagagtataactataatagtcataacgtctatattatggccgataaacaaaagaacgggatcaaggtcaacttcaagattcgacataatatcgaagatgggtcggtacaacttgccgaccactatcagcaaaacacgcccataggcgatggccctgtccttctcccggataatcattacctctctactcaatccgcgttgagtaaggaccctaatgagaagcgagatcatatggttcttttagagttcgtcacagctgccgggattactctcggcatggacgaactctataagagatctcgcgacataagccacggcttcccgccagccgtggctgcccaggatgacgggacactcccgatgtcttgtgctcaagaatcgggaatggaccgtcatcctgcggcatgcgccagcgcccggattaacgtctga

SEQ ID NO: 700 - DNA, 855 bp, Artificial Sequence
  Modified Open Reading Frame
atggtatcaaaaggggaggaactcttcacgggggtcgttcccatcctcgttgaactcgacggagacgtgaacggacataagttcagcgtctccggcgagggcgagggtgacgccacgtacgggaagcttaccctgaagtttatatgtactacgggtaagcttcccgtaccgtggcccaccctcgtcacgacgctaacttatggcgtccaatgcttcagtcggtaccccgaccacatgaagcagcacgacttttttaagtcggctatgcccgagggttatgtgcaggagcgcaccatcttcttcaaagatgatggtaattataaaactcgggcagaagtgaagtttgaaggcgataccctggtcaatcggattgagcttaagggtatcgacttcaaagaggatgggaacattttaggccacaagcttgaatacaattacaacagccataatgtgtacattatggccgataagcagaagaatggtatcaaggtgaatttcaagattcgccataacatagaggacgggtccgtccagcttgctgatcactatcagcaaaatacaccgataggggacggacccgtcctcttgcctgataaccattacctgagtactcagtctgctctatcgaaggaccccaacgagaagagggaccacatggtcctcctcgagttcgtcaccgcagcgggaataacgctggggatggacgaactctacaaacgttcccgtgacattagtcacgggttccctcccgctgtcgctgcacaagacgatgggacccttcccatgtcttgtgcacaagagagcgggatggaccggcatcctgccgcctgcgcctcggcgcggataaacgtttga

SEQ ID NO: 701 - DNA, 855 bp, Artificial Sequence
  Modified Open Reading Frame
atggtttcaaagggcgaggagctgtttacgggcgtcgtccctatccttgtcgagcttgacggcgacgtcaacggacacaagttttctgtgtccggagaaggagagggcgacgccacgtacggcaagctcactctcaagtttatctgcacgacaggtaagctaccggtcccgtggccgactttagtcaccaccctaacgtatggggtgcagtgctttagtcggtatccggaccacatgaaacagcatgacttctttaagagtgctatgcccgagggttatgtgcaggaacggaccatcttcttcaaagacgacggcaactataaaactagggccgaagtcaagtttgaaggagatacgctggtcaaccgcatagaactcaagggcatagactttaaagaagacggtaacatcttggggcacaagttggagtacaactataattcccacaatgtttatatcatggcggataaacagaaaaacggaattaaggtgaatttcaagattcgccataacatcgaagatgggagtgttcagttggcagaccactaccaacagaacactcccatcggcgatggccccgtgttgttaccggacaatcactatttgtccactcaatctgcgctgtcgaaggaccccaacgaaaagcgcgatcacatggtgctgttggagttcgtcacggccgcggggataaccctgggaatggacgagctatacaagcgtagccgggacatttcccatgggtttcccccggccgtggcagcgcaggatgatggtaccttacctatgtcgtgcgcgcaagagagcgggatggatcgccatcccgctgcttgcgcatcggcacgcatcaatgtgtga

SEQ ID NO: 702 - DNA, 855 bp, Artificial Sequence
  Modified Open Reading Frame
atggtttcaaagggagaagagttattcactggcgtagtccccatcctcgtcgagctcgacggggatgtgaatggacacaagttctccgtctccggtgagggagagggagatgccacttatggcaagttgactttgaagttcatctgcacgaccggaaagcttccggtcccgtggcccacacttgtgaccactttgacctacggcgtgcagtgtttctcgaggtatcccgaccacatgaagcagcacgacttttttaagtcggccatgccggagggatacgtccaggaacgcaccatcttctttaaggatgatggtaactataagacgcgcgccgaggtcaaatttgaaggcgataccttggtcaatcgcattgagcttaaaggtatcgacttcaaagaggatgggaacatcctcggtcacaagttggagtacaactacaacagccataatgtgtacattatggctgacaagcagaagaacgggatcaaagtcaactttaaaatacgccacaacattgaggacgggagcgtgcagctagcagatcattatcagcaaaatacgccgataggtgacggtccagtgctactccctgacaatcactatttgagcacccagtcagcactaagtaaggaccctaatgaaaaaagggaccacatggtgctgctggagttcgtgaccgcagccgggataaccctggggatggacgagctgtataagcgcagccgggacatctcccatgggtttcccccggctgtggcggcacaggacgatggtacgctaccaatgtcctgtgcccaggagagtggcatggaccgtcaccctgctgcctgcgcgtctgcccgtatcaatgtttaa

SEQ ID NO: 703 - DNA, 855 bp, Artificial Sequence
  Modified Open Reading Frame
atggtcagtaagggtgaggagctctttaccggagttgtaccaattctggtagagctcgacggggacgtgaacggtcacaagttctcggtcagtggtgagggtgaaggtgatgccacatatggcaagctcaccttgaaattcatctgcaccactggcaagctccccgtcccatggccgaccctggtgaccacccttacatacggggtacagtgtttttcacggtaccccgatcatatgaagcagcatgatttttttaaatctgccatgcctgaaggatacgtacaagaacgtacgatattcttcaaggatgacgggaactataagacccgtgcagaggtgaaattcgagggggataccctcgtcaataggatcgagctcaaagggattgattttaaggaggatggaaacatcctgggccacaagttggagtataattacaacagccataatgtgtacattatggctgacaagcagaagaatgggatcaaggtgaacttcaagatccgtcacaatattgaggacggatctgttcagcttgcagaccattatcagcagaatactccaattggtgatggcccggtattattaccggataatcattatttatccactcagtccgctttgagcaaagatcctaatgaaaagcgagatcacatggttctgctagagttcgtcactgccgcggggattaccctcggcatggacgagctctataagcggagccgtgatatctcgcacggatttccccctgcggtggcagcacaagacgatggcactttgccaatgtcttgtgcccaggagtcgggcatggacagacatcctgccgcgtgcgctagcgcgcggatcaatgtctga

SEQ ID NO: 704 - DNA, 855 bp, Artificial Sequence
  Modified Open Reading Frame
atggtcagtaagggagaggaactattcaccggagtagttccgatcctggtcgagcttgacggggacgtcaacgggcacaagttctctgtcagtggtgagggtgaaggcgatgccacgtacggcaagctgacgttaaaattcatctgcaccactggcaaactgcccgtgccttggcccacgcttgtgacgacgctgacgtacggcgtccagtgcttcagtcggtaccccgaccacatgaagcagcacgatttttttaaatcggccatgcccgaagggtatgtgcaagagcgtaccatcttctttaaagatgatggtaattacaagacgcgggccgaggtaaagttcgaaggggatacccttgtgaacagaatcgaactcaaagggatcgattttaaagaagatgggaatattctcggccacaagcttgagtataattacaacagccataacgtctatattatggcggataagcagaagaatggcattaaagtcaacttcaagatccgccataatatagaggatggtagtgttcagttggctgatcactaccagcagaacacgcccatcggagatgggcctgttctgctgcctgacaaccattacctgagcacccagtcagcactatcaaaggatcccaatgagaagagggatcatatggtgctgctggagttcgtgacggctgcaggcataacgttaggcatggatgaattatacaagcgtagccgagatatttcccatggattcccgccggcggtggccgcgcaggacgatgggacgcttcccatgtcctgcgcgcaggaatccgggatggaccgccatcccgctgcatgcgcatcggccaggatcaatgtgtga

SEQ ID NO: 705 - DNA, 855 bp, Artificial Sequence
  Modified Open Reading Frame
atggtaagtaagggcgaagaactctttaccggggtggttcccatcctggtggagttggacggggatgtgaacggacataaattttccgttagcggagagggtgagggtgacgctacctatggtaagctcaccctcaagttcatatgcacgacgggaaagctgccggttccatggccgactcttgtgacgaccctgacctacggggtccagtgcttcagcaggtacccagatcacatgaaacagcatgacttctttaagagtgcaatgcccgaaggatacgtccaggagcggacgatattcttcaaagacgacggcaactataaaactagggccgaagtcaagttcgagggcgatacgttggtaaatcgcatcgaacttaagggcattgactttaaagaagatggtaacattctgggtcacaagctggagtacaactataattctcataatgtctatattatggcggacaagcagaagaacgggatcaaggtgaattttaagattcgccataatattgaagatggttctgttcaactagcagaccattatcaacaaaatacgccgataggcgatggtcccgttcttctgccagataatcattatctgagtactcagtccgcccttagtaaagaccccaatgagaagcgagaccatatggtcttgctagagttcgtcactgccgcggggataaccctcggcatggacgagctctataagcgaagccgtgacatcagtcacggcttcccgccagccgtggcggcacaggacgatgggacacttcccatgtcctgtgcacaagagtcgggcatggaccggcatcccgcggcatgtgcgtccgctcgcatcaacgtctaa

SEQ ID NO: 706 - DNA, 855 bp, Artificial Sequence
  Modified Open Reading Frame
atggtctcgaaaggtgaggagctttttactggcgtggtcccaatattggtagagctggacggagacgttaacggacacaaattttccgttagcggggaaggggaaggagatgctacatatggtaagctgacgcttaagttcatatgtacgacgggcaaattgcccgtcccgtggccaacactggtcacgactctgacttacggagtgcaatgtttttcccgttaccccgaccatatgaagcagcacgacttttttaagtcggctatgccggagggatacgttcaagagcgcaccatcttcttcaaggatgatggtaactacaagacccgggctgaggtaaagttcgagggggataccctcgtgaaccggatagagttgaagggcattgattttaaggaggacgggaacatcctcggccataagttggagtacaactacaacagccataatgtatacattatggctgataaacagaagaatggcattaaggtgaatttcaagattcgccataatatcgaggatgggagtgttcaacttgctgatcactatcagcagaacactcccatcggggatgggcccgtcctcctgcccgacaaccactatctgagtacccagtccgcgctctcgaaggatcccaacgagaagcgggaccacatggtcctgcttgagttcgtcacagctgccgggatcacgctaggtatggatgagctatacaagcgttctcgtgatatatcacacgggtttcctcccgccgtggcggcacaagacgatgggactcttcccatgtcttgtgcccaggagagcgggatggatcgccatcccgctgcctgtgcctcggcgaggataaacgtgtga

SEQ ID NO: 707 - DNA, 855 bp, Artificial Sequence
  Modified Open Reading Frame
atggtaagtaagggcgaggagttgttcacgggcgtcgtaccaatcttggtcgagctcgatggcgacgtcaacggccataagtttagcgtctccggcgagggcgaaggagacgctacttatggcaagttgaccctcaaatttatatgcacgacgggcaagctgcccgtcccgtggccaactttggtcacgacgctgacgtacggggtgcagtgcttcagtcggtacccggaccatatgaaacagcacgacttttttaagtcggctatgcccgaagggtacgtccaggaacggacgatcttcttcaaagacgacggcaactataagactagggccgaagtcaagtttgaaggagatacgttggtgaaccggatagagctgaaggggatcgactttaaggaggatggtaatattctaggtcataaactagaatataactacaacagccataatgtttacattatggctgataagcagaaaaatggaattaaggttaatttcaagatcaggcacaatatagaggacgggtccgtccaacttgctgatcactatcagcaaaatacaccgataggggacggacccgtcctcttgcctgataaccattacctgtcgacccagtcagctctgtccaaggatcccaacgaaaagcgggatcatatggtcctcttggagtttgtcaccgcggctggaataaccttggggatggacgagctctataagaggagccgggacatctcccatggttttccacccgcggtggcagcacaagacgacggtacgttaccgatgtcttgtgcccaagagtcgggtatggacaggcaccctgcagcctgtgcgtcagcgcgtataaatgtatag

SEQ ID NO: 708 - DNA, 855 bp, Artificial Sequence
  Modified Open Reading Frame
atggttagcaaaggggaagagctcttcacaggagttgtacctatattggtcgagctggacggtgacgtgaacggtcacaagttcagcgtgtccggcgagggagagggtgacgccacgtacggtaagcttactcttaagtttatctgtacgactggcaagttacccgttccctggcccaccctcgtaactaccctcacgtacggggtccagtgtttcagtcggtatccagaccacatgaagcaacatgacttcttcaagtctgcgatgcctgaaggatatgtccaggaaaggacaatattcttcaaggatgacggaaactacaagacccgtgcggaggtcaagttcgagggtgataccctagtaaataggatagaacttaaagggattgactttaaggaggatggaaacatcctcggacacaagttggagtataactataattcccataatgtgtatatcatggctgataagcagaaaaatgggattaaggttaacttcaaaattcgacacaatatagaggacgggtccgtccaattggcggatcactatcagcagaacacgccaattggggacggacccgtcctgctgccggacaatcattatttgtcgacgcaatctgcgttgtcgaaggacccaaacgaaaagcgagaccatatggtcttgcttgagtttgtaacggcagcaggtataactcttgggatggacgagctctacaagcgcagccgcgacattagccatggtttcccacctgctgtggcagctcaggatgatgggacattacccatgagctgcgcacaggagagtgggatggaccggcatcccgcggcctgcgcttctgcacgtattaacgtgtag

SEQ ID NO: 709 - DNA, 855 bp, Artificial Sequence
  Modified Open Reading Frame
atggtatctaaaggggaggagcttttcacaggggtagtgcccatcctcgtggagcttgacggagatgtcaatggacataaattctccgtcagcggcgagggcgagggggacgccacgtacgggaagcttaccctgaagttcatatgtactacagggaagcttcccgtgccgtggccgacgcttgtcacgaccctaacctatggggtccaatgcttcagtcggtatcccgaccatatgaagcagcacgacttttttaagtcggctatgccggagggctatgtccaagagcgtaccatcttctttaaagacgacgggaattacaagacccgtgccgaagtgaaattcgagggcgatactctcgtcaatcgaattgagctgaagggcatcgactttaaagaagatggtaacattcttggacataagttggagtacaactacaatagccataatgtgtacattatggctgacaagcagaagaacggtatcaaggtgaatttcaagattcgccacaacatcgaggacgggtccgtccagctggcagatcactaccagcagaatacaccgataggggacggacccgtcctcctgcctgataatcactatttatcaacgcagagtgcgttaagcaaagatcccaacgaaaaacgggatcatatggtactgttggagttcgtcactgccgcggggattaccctcggcatggacgagctctacaagcgaagccgtgacattagtcacggcttcccccccgccgtcgccgcccaggatgatgggacactacccatgagctgtgcacaggaaagcgggatggatcgccatcccgctgcctgtgccagcgctcgcattaatgtgtaa

SEQ ID NO: 710 - DNA, 855 bp, Artificial Sequence
  Modified Open Reading Frame
atggtaagcaaaggggaggagcttttcaccggggtggtcccgatcttggtggagctggatggcgatgtaaatggccataagttttctgtgagcggggagggcgagggtgatgccacgtacggcaagttgacgctgaagttcatttgcacgaccggcaagttgccggtcccgtggcccaccctcgtaactactctgacttatggcgtacagtgcttctccaggtatcccgaccatatgaagcaacatgacttcttcaagtcggcgatgccggaggggtacgtccaggagcgtaccatcttctttaaagacgacggcaactataagactagggccgaagtcaagtttgagggggataccctcgtcaatcgcattgaactcaaggggattgactttaaagaagatggtaatatcctgggccataagttagagtataactacaacagccataacgtctatattatggcggataaacagaagaatggaattaaagttaatttcaagatccgccataatatagaggatggctccgtccagctcgcagatcactaccagcaaaacaccccgatcggggacggcccggtgttgctcccagacaatcactacctgtcgacgcagtctgctttgtcgaaggatccaaatgagaagagggaccatatggtccttctggagttcgtcacagctgccgggataactctcggcatggacgagctctataagcggtcccgtgacattagtcacgggttcccgccggcggtggccgcacaagacgacggtacgttaccgatgtcttgtgcccaggaatctgggatggatcgacatccagcagcctgcgcgtcagctaggatcaatgtctga

SEQ ID NO: 711 - DNA, 855 bp, Artificial Sequence
  Modified Open Reading Frame
atggtttcgaaaggtgaggagttattcactggcgtcgtccccattctagtcgagctagatggggacgtgaacgggcacaagttcagtgtgtctggggaaggcgagggggacgctacatatggtaagcttacgcttaaattcatatgtacgactggtaagttaccagtcccctggcctaccctagttaccacactgacctacggggtacaatgcttcagcaggtaccccgaccacatgaagcagcacgacttctttaagtcagccatgcccgagggatacgtccaagagcggaccatctttttcaaagatgacgggaattacaagacccgtgctgaggtcaaattcgagggggacacccttgttaatcgcatcgagctcaagggtatcgattttaaggaggatggtaacatcctcggccataagttggagtataactataacagccataatgtgtacattatggctgataagcagaagaatggcataaaagttaacttcaagataaggcataatatcgaggacggaagcgtgcagctcgctgatcattatcagcaaaataccccgataggggacgggcctgtactgcttccggacaaccattacttgagcacgcaaagtgctctaagtaaagatcccaatgagaagagggatcatatggtcctcctcgagttcgtgaccgcagcaggtatcaccttgggcatggatgaactttacaagagaagtcgtgacatctctcatgggttcccgccggctgttgccgcacaagacgacgggactctcccgatgtcttgtgcgcaagagtccggcatggaccgccacccggcggcttgtgccagcgccaggattaacgtctga

SEQ ID NO: 712 - DNA, 855 bp, Artificial Sequence
  Modified Open Reading Frame
atggtatctaaaggtgaagagctttttaccggggtcgtccccatcctagtggagctggatggggacgtcaacggtcataagttcagcgtgtccggcgagggggaaggcgatgcgacgtacggtaaacttactcttaagtttatctgtacgacgggaaagcttcccgtcccgtggccgacgctcgtcacaaccctcacgtatggcgtgcagtgcttcagtcggtaccccgaccacatgaagcagcacgacttttttaagtcggccatgcctgagggttatgtgcaggagcgtacgatcttcttcaaggatgacggaaattataagacacgtgccgaagttaagttcgagggtgacaccctggtaaacaggatagagttaaaggggattgactttaaggaggatggtaacatcctcggtcacaagctcgaatataactacaacagccataatgtttacattatggctgataaacaaaaaaacggcatcaaagtgaattttaagatccgtcataacattgaagatgggagtgttcaacttgctgatcactatcagcagaacactcccatcggcgacgggcccgtgctcctcccggacaaccactatctcagtactcaatcggccttgtcaaaggacccgaatgagaagcgtgatcatatggtgctgttagagtttgtgacagcagcagggatcacgcttgggatggatgagttgtataagaggagccgggatatttcgcatggctttcccccggcggtggccgcacaggacgacggcactttgccgatgtcctgtgcgcaggagtcggggatggaccgccatcccgcggcttgtgcgtccgccaggataaacgtttga

SEQ ID NO: 713 - DNA, 855 bp, Artificial Sequence
  Modified Open Reading Frame
atggtatctaaaggcgaagaactcttcacaggcgttgtgcccatccttgtggaactagatggtgacgttaatggacataagttttcggtatcgggtgagggcgagggtgacgccacgtacgggaagcttaccctgaagttcatatgtactacagggaagcttcccgtaccgtggcccaccctcgtcaccaccctcacgtacggggtgcagtgtttttcacggtaccccgaccacatgaagcagcacgacttttttaagtcggcgatgccggaaggttatgtccaggagcgcaccatcttcttcaaggatgatggcaactacaagactcgagccgaagtcaagttcgagggtgataccttggtcaaccggattgagttgaaaggtattgatttcaaggaagatgggaacatattaggtcacaagctagagtataattacaatagccataacgtctatattatggcggataagcagaagaatggcattaaagtcaacttcaagatccgccataatatagaggacggcagcgtccagctggcagaccactaccagcaaaacaccccgataggggatggacctgtcctacttcctgataatcattacctttcaactcagtccgcgttgtccaaggatccaaacgagaagagagaccatatggtcctcttggagtttgtgaccgctgcgggcataaccctgggaatggacgagctttataagaggtctcgtgacatttcccatgggtttccgcccgcagtggcagcgcaggacgatgggacgcttcccatgtcctgcgctcaggagagcggtatggaccgccaccctgcagcttgtgcttcggctcgaatcaacgtctga

SEQ ID NO: 714 - DNA, 855 bp, Artificial Sequence
  Modified Open Reading Frame
atggttagcaagggtgaagagctattcacgggggttgtccccatcctcgtcgaactcgacggggacgtgaatggccataagtttagtgtcagcggcgagggggagggagacgcaacttatggtaagttgacgttgaagtttatctgtactacaggtaagcttcccgtgccatggcctactctcgtgaccactcttacctatggcgtgcaatgcttcagtcggtatcccgaccatatgaagcagcacgacttttttaagagtgccatgccggagggttatgtccaggagcgtaccatcttctttaaagacgacgggaactataagacccgtgccgaggtcaaattcgagggcgatacgttggtaaatcgcatcgaattgaaaggcatcgactttaaagaagatggtaacatcctgggccataagttagaatacaattataattcccataacgtctatattatggccgacaagcagaagaatgggatcaaggtgaatttcaagattcgccataacatcgaagatgggagtgttcagctggcagatcactaccagcagaacactcccatcggcgatggcccagtgctgttgccggataatcactatttatccacgcaatcagcactgagcaaagatcccaacgagaagcgcgatcatatggtgcttctcgagtttgtcacggcggcgggcataaccctcggcatggatgagctgtataagcggtcacgagatataagccatggcttccctcccgccgtcgctgcgcaagacgatggcacactgccaatgtcttgcgcgcaggagagcgggatggaccgccatcctgcggcgtgcgcaagcgcgcgcattaacgtatga

SEQ ID NO: 715 - DNA, 855 bp, Artificial Sequence
  Modified Open Reading Frame
atggtgagtaaaggcgaggaacttttcaccggcgtggtgccgatcctggtcgaacttgacggcgacgtcaacggccataagttcagtgtgtcgggagagggggaaggggacgccacgtacgggaagcttaccctgaagtttatttgtactacagggaagcttcccgtgccgtggccgacgctggtgacgacgctcacctacggcgtccagtgcttttcccgctatcccgaccacatgaaacagcacgacttttttaagtcggctatgcctgaaggatacgtccaggagaggacgatattcttcaaggacgacggcaactataagactagggccgaggtgaaattcgagggggacactctggtgaataggattgagctcaaaggtatcgactttaaggaggatggaaacatcctcgggcataagctcgagtataattacaacagccataatgtatacattatggctgacaagcagaagaatgggattaaggttaacttcaagatccgtcacaacattgaggacggatctgtgcagttagccgaccattatcagcagaatacaccgataggtgatgggccagtcctattaccagataaccattacctgtcgacgcaatcagcgctgtcgaaggacccgaatgagaagcgcgaccatatggtcctcctcgagttcgtcaccgcggccggcatcacgctggggatggatgagctgtacaagcggtcccgtgacataagtcacgggttccccccagcggttgccgcgcaagacgatgggacacttcccatgtcttgcgcgcaggagtccggcatggatcggcaccccgccgcgtgtgcctctgcacggataaacgtgtaa

SEQ ID NO: 716 - DNA, 855 bp, Artificial Sequence
  Modified Open Reading Frame
atggtaagcaagggtgaggagctcttcacgggggtcgtgcccattctggtcgaactggacggagacgtcaacggtcacaaattcagcgtgagtggagagggtgagggtgatgctacctatggtaagctcaccctgaagttcatttgtaccaccggtaaattaccggtgccatggcctacacttgtgacgacactcacctatggggtgcagtgtttttcccgttatcctgaccatatgaagcagcacgacttttttaagtcggctatgccagaaggatacgtccaggagcggacgatcttttttaaagacgatggcaattacaagacccgagccgaggtgaaattcgagggggacaccctcgttaatcgcatcgagctcaaggggattgacttcaaggaggacgggaatatactcgggcacaagctcgagtataactacaatagtcacaacgtgtatatcatggcagacaaacagaaaaatggtataaaagtgaacttcaagatccggcataatatagaggacgggtccgtccagttggcggatcactaccaacagaacacgccaattggggacggacccgtcctcttgccggataatcactacctctccactcaatctgcgctgagtaaggacccgaacgagaagcgcgatcacatggtgcttctcgagttcgtcaccgcggccggcataaccctgggtatggacgagctctataagaggagccgggacatatcccacgggtttccgccggccgtggcggcacaggacgacggtacattaccgatgtcctgtgcccaggagtccggaatggaccgacaccccgcggcgtgcgcctccgcacgtatcaacgtgtga

SEQ ID NO: 717 - DNA, 855 bp, Artificial Sequence
  Modified Open Reading Frame
atggtatcgaagggcgaggaactattcactggagtggttcccatcctcgttgagctagatggtgacgttaacggacacaagttctctgtgtccggcgagggtgagggtgacgctacctatggcaaattgacgcttaagttcatttgcacaacaggtaagttacccgtaccctggccgaccctggtgacgactttaacatatggtgtccaatgttttagtcgttacccggatcacatgaagcagcacgatttcttcaaatcggcgatgccggaaggatacgtgcaggagcgcaccatcttttttaaggacgatgggaactataagactcgagctgaggtgaagttcgagggtgacactctagtgaataggattgagttgaaaggtattgatttcaaggaggacggaaatatcctcggccataagttagagtataactacaatagtcataacgtctatattatggccgataaacaaaagaacggaatcaaagtcaattttaagattcgtcataatattgaggatggttccgttcagctggccgatcactatcagcagaatactcctattggtgatgggccagttctcctccctgataatcattacctttcaactcagtccgcgctctcaaaggaccccaatgagaagcgcgaccatatggtcctgctggagttcgtgactgcagcaggaataaccctggggatggatgagctctataagaggagccgagacatctcccacgggtttcctcctgcggtcgccgcgcaagatgatggaaccctacccatgtcgtgcgcgcaggagagcggcatggataggcatccagcagcttgcgcgagcgcccgcatcaacgtgtga

SEQ ID NO: 718 - DNA, 855 bp, Artificial Sequence
  Modified Open Reading Frame
atggtatcaaagggagaggagctgttcacaggcgtcgtccccatattggtggagctggacggcgacgtgaatggacacaagttttctgtgtcgggggagggcgagggcgacgcgacgtacgggaagcttaccctgaagttcatctgcactacgggtaagcttcctgtgccctggcccactttggtaaccacactgacgtatggcgttcagtgcttctcgcggtatcccgatcacatgaagcagcatgacttcttcaaatcggcgatgcctgagggttatgtccaggagcgtaccatcttctttaaagacgatggcaactacaagacccgggccgaggtgaagttcgagggcgacaccttggtgaaccggatcgagttgaagggcatcgactttaaagaggatggtaatatcctgggccataagttggaatacaactataactctcacaatgtctacattatggcagacaagcagaagaatggtatcaaagtgaacttcaaaatccgacacaatattgaagacggttccgttcagctcgccgatcattaccagcagaatacaccgattggggacggcccggtgctcctgccggacaatcattacctgtcgactcaatcggcactgtccaaggatcccaacgagaagcgtgatcacatggttctgttggagtttgtgaccgccgccggcatcacactgggcatggacgagctttacaaacgatccagggacatcagccacggctttccgccggccgtggctgcccaggatgatgggacgttgccgatgagttgcgcacaggagtccggcatggacagacacccggccgcctgtgccagcgcacggataaacgtgtaa

SEQ ID NO: 719 - DNA, 855 bp, Artificial Sequence
  Modified Open Reading Frame
atggtaagtaaaggtgaggagctttttaccggtgtggtcccgattctcgtggaactcgacggagacgttaacgggcacaagttttcggtgtcgggagaaggagagggcgacgccacctacggtaagttgacgttgaagttcatctgtaccactggaaagctccccgtaccttggcctactcttgtgactacgctaacgtacggggttcagtgtttcagtaggtaccccgatcatatgaagcagcacgacttctttaagtctgccatgcctgaaggatacgtgcaggaacgcacgatattcttcaaggacgatggcaactataagactcgtgctgaggtcaaatttgaaggcgatacccttgtgaatcgtatcgagctcaagggtatcgacttcaaagaggatggcaacatcctcggccataagttggagtacaactataacagccataatgtgtacattatggctgataagcagaagaacgggataaaggtgaacttcaagatacgtcataatatcgaggatggctccgtgcaactcgcggatcattaccaacagaacactcctattggtgatggccctgtccttcttcccgacaaccattacttgtccacgcagagcgctctgtcgaaggatccgaacgagaagcgggaccacatggtgctccttgaattcgttaccgccgctggcataacgctggggatggatgagctatacaagaggtcgcgggacatctcgcatggctttcctcccgcagtggccgctcaggatgacgggacactcccgatgtcctgtgctcaggaatcgggaatggaccgtcatccagcggcctgtgccagcgcgcggattaacgtgtga

SEQ ID NO: 720 - DNA, 855 bp, Artificial Sequence
  Modified Open Reading Frame
atggtaagcaagggggaggagttatttacgggcgtcgtccccattctcgttgagcttgatggcgacgttaatggccacaagttcagcgtgagtggggagggcgagggcgacgccacatatggcaagttgaccctcaagttcatatgtaccactgggaaactcccagtgccgtggccaacgctggtcacgacgcttacatatggagtacagtgcttctccaggtatccggaccacatgaagcagcacgacttcttcaagtccgcgatgccggaggggtacgtacaagagagaaccattttctttaaggacgacggcaattacaagaccagagcagaggttaagtttgaaggcgatacccttgtcaaccgtatcgagttgaaagggatcgacttcaaagaggatggtaacatactgggccataagctggagtacaattataattcacataatgtctacatcatggctgacaagcagaaaaatggcattaaggtgaattttaagatccgccacaacattgaggacggctcagtgcagttggcggatcactaccagcagaatacgccgataggcgatggcccagtattgttaccagacaaccactatctgtctacacaaagcgcgttgtccaaggaccccaacgagaagcgtgatcacatggttctcttggagttcgtcacggctgcggggataacgcttggtatggacgagctatacaagcggagccgtgacattagtcacggctttcccccagccgtggcggcacaagacgatgggacccttcccatgtcttgtgcgcaggagtcggggatggaccgccatcccgcggcttgtgcgtccgcccgtattaacgtctga

SEQ ID NO: 721 - DNA, 855 bp, Artificial Sequence
  Modified Open Reading Frame
atggtgtcaaaaggagaggaactgttcaccggagttgtccccatcctcgtcgaactcgacggggatgtcaacggccacaagttctccgtaagcggagaaggtgagggtgatgccacctatggcaagctcaccctcaagtttatttgcactaccggaaagcttccggtaccgtggccgaccctggtcacgaccctcacgtatggcgtgcaatgtttcagtcggtatcccgaccatatgaaacagcacgacttttttaagtcggccatgcctgagggttatgtccaggagcgtaccatcttctttaaggatgatggtaattataagactcgagctgaggtaaagttcgagggggacactctggtgaacagaatcgaattgaaaggaatcgattttaaggaggatggcaacatcctcggtcacaaactcgagtataactataattcccacaacgtctatattatggcggataaacagaagaatggcatcaaagtcaacttcaagatccgccataatatagaggacgggtctgttcagcttgcggaccactatcagcagaacacgcccatcggtgatgggcctgttctgctgccagataaccattatctgagcacacagtccgcgctgagcaaagacccgaacgaaaagcgggatcatatggttttactcgagtttgtgacggctgcgggaattaccctgggcatggatgaactctataagaggagccgtgacattagtcacggctttcctccggcggtggccgcgcaggacgacggtactctaccgatgtcctgcgcccaggagtcggggatggaccgacatcccgcagcctgcgcgagtgcgcgcataaacgtttag

SEQ ID NO: 722 - DNA, 855 bp, Artificial Sequence
  Modified Open Reading Frame
atggtcagcaagggtgaagagctgttcacgggggtcgttccaatcctggttgagcttgacggagatgtgaacggtcacaagttctccgtcagcggagaaggtgagggtgatgccacgtatggcaaactcaccctcaaattcatctgcacgacaggtaagctaccggtgccgtggccaacgctggtgacgaccctgacctacggggtccagtgtttcagtcggtaccccgaccatatgaaacagcatgacttttttaagtctgcgatgccggaaggttatgtccaggagcgtaccatcttctttaaagacgatggcaactacaagacgcgggccgaggtaaagttcgaaggcgataccttggtcaaccgcatcgagttgaaaggcatcgactttaaagaagatggtaacatcctaggacataagcttgagtataattacaacagccataatgtatacattatggctgataagcagaagaacggcatcaaggttaacttcaagatccgtcacaatattgaggacggatctgtgcagttagccgaccattaccagcaaaacacacccattggcgacggcccggtattgctacctgataatcattacctctcaacgcaatctgcgttgagcaaggatcctaatgagaagcgggaccacatggtcctgcttgagttcgtgaccgccgcggggataaccttggggatggacgagctctacaagaggagccgggacatctcccatggttttcccccggcggtcgcggctcaagatgacgggacattgccgatgtcctgtgctcaagaatcaggaatggatcgacaccccgcggcatgcgcttccgcacgtattaacgtgtga

SEQ ID NO: 723 - DNA, 855 bp, Artificial Sequence
  Modified Open Reading Frame
atggtttctaagggcgaagagctctttactggagttgttccaatcctcgtcgaactcgacggggatgtgaacggacataagttctcggtgagcggtgagggcgagggcgacgcaacgtacgggaagcttaccctgaagtttatttgtactacgggtaagcttcccgtgccgtggcccacgctcgtcaccacgctcacctacggagtacagtgcttcagtcggtatcccgaccatatgaagcagcacgacttttttaagtcggctatgccggagggatatgtccaagagcgaactatcttcttcaaggacgacgggaactacaaaacccgcgccgaagtgaagttcgagggtgacactctagtgaaccgcatcgagttgaagggtatagacttcaaggaggatggcaacatcctcgggcacaagctggagtacaattataacagccataatgtttacattatggctgataagcagaagaatggtatcaaggtgaattttaagatccgtcacaatattgaggacggatctgtgcagctggccgatcactatcagcaaaatacgccgataggtgatgggccagtgcttttacctgataaccattatctgagtacccagagtgccctgtctaaggaccccaacgagaagcgggaccacatggtcttactagagtttgtcaccgctgccgggattactctcggcatggacgagctgtacaagcggtccagagatatttctcatggattccctccggcagtggcggcccaggatgacggtaccctgcccatgtcctgtgctcaggagtcgggcatggaccgtcatccggccgcctgtgcttcggcgagaattaatgtctga

SEQ ID NO: 724 - DNA, 855 bp, Artificial Sequence
  Modified Open Reading Frame
atggtgtcaaagggagaggagctattcacaggagtagttcctattctcgtcgaacttgatggagatgtgaacgggcacaagttctcggtatctggggaaggcgagggagacgctacgtatgggaagttaacactgaagttcatatgtacgactggtaagttaccagtcccatggccgactttagtgactacccttacgtacggtgtccagtgcttttcccgatacccagatcacatgaagcagcatgacttcttcaagtccgctatgcctgaaggctacgttcaggagcggaccatcttcttcaaggacgacgggaattacaagacccgggcggaggtaaagttcgagggtgacactttagtcaatagaattgaactgaagggtattgatttcaaggaagatggcaacatactgggccataagctggagtataactataatagccataatgtgtatatcatggctgataagcagaaaaatggcattaaagttaacttcaagattcgacacaatatcgaagatgggagtgttcagttggcagaccactaccaacagaacactcccatcggcgatggcccagtgctacttcctgataatcattacctgagcactcagtcagccttgagcaaagacccgaacgagaagcgagaccacatggtgcttctagagttcgtcactgccgcggggattaccctcggcatggacgaactctacaagcggtctcgcgatatctcgcacgggtttcctcccgctgtcgcagcacaggacgatggcactctgccaatgtcctgtgctcaagagagcgggatggaccgccatccggcggcctgtgcctccgcccggatcaatgtatag

SEQ ID NO: 725 - DNA, 855 bp, Artificial Sequence
  Modified Open Reading Frame
atggtcagcaaaggggaggaactgtttacaggcgtggtgccaatcttggtagaacttgatggcgatgttaatggccacaagttctccgtcagcggcgagggtgagggcgacgcgacgtacggtaaacttactcttaagtttatctgtacgactggtaaactaccagtcccgtggcccaccctcgtaacgacgctgacgtatggcgtccagtgcttcagtcggtaccccgaccacatgaagcagcacgacttcttcaagtctgctatgcctgaggggtacgtccaggagcgtaccatcttctttaaagacgatggcaactacaagacccgtgccgaggtcaagttcgagggtgacacccttgtcaaccgcatcgaacttaaaggcatcgactttaaagaagatggtaacatcctgggccataagctagagtataattacaatagccataatgtatatattatggcagataagcagaaaaatggcataaaggtgaattttaaaattcgccataacatcgaagatgggagtgttcagttggcggaccactaccaacagaacactcccatcggcgatggcccggtgctgttacctgacaaccactatctgagcacgcagagcgcgctcagtaaagatcccaatgagaagagggatcacatggtgttgttagagtttgtgacagcagccgggatcacgctgggcatggacgagctatacaagcggagccgtgacatcagtcacggctttccgccggcggtggcggcgcaggatgacggtaccttaccgatgtcttgtgctcaagagagcggtatggaccgtcatcccgccgcctgcgcctccgcgcgtataaacgtttag

SEQ ID NO: 726 - DNA, 855 bp, Artificial Sequence
  Modified Open Reading Frame
atggtgagcaaaggtgaggagttgtttacaggggtcgtcccaatcctagtggagctagacggcgacgtgaacgggcacaagttcagcgtcagcggcgagggggagggagatgccacgtacggcaaattgacgcttaagtttatttgcacgacgggcaaactccctgtcccctggccgactctcgtgacaacactcacatacggcgtccagtgcttcagtcgttatcctgatcacatgaagcagcatgacttcttcaagtctgccatgcctgaaggatacgtccaggaacggacgatattcttcaaggacgatgggaattataagactcgagctgaggtcaagttcgagggggatacgctggtaaaccgcatcgagctgaagggaattgacttcaaggaggatggcaacatcctcggccataagctcgagtacaattataattcccataacgtctacatcatggcagacaagcagaagaacgggattaaagtaaactttaagatcaggcataacattgaagatggtagcgtgcagctcgcggatcattaccagcagaacacgcccatcggtgatgggcctgttctgctgccagataaccattatctgagcacgcaaagtgctctcagtaaagatccgaacgagaagcgcgaccatatggtgctgttggagtttgtcacggccgctggcatcacactaggaatggacgagctctataaacgatcccgagacattagccacggcttcccaccagccgtggcggcgcaggacgatggcactttgccaatgtcctgcgcccaggaaagcggcatggatagacatcctgccgcgtgcgcctcggcgcgcattaatgtctga

SEQ ID NO: 727 - DNA, 855 bp, Artificial Sequence
  Modified Open Reading Frame
atggtttctaaaggcgaggaactgttcactggcgttgtcccgatcctggtagagctcgatggtgatgtgaatggacacaagttctccgtcagtggtgagggagagggcgacgccacgtatggcaagttgaccctcaaattcatatgcaccacgggcaaactaccagtaccctggccaacgttggtaacaacgttgacctacggggtacagtgcttcagtcggtatcccgaccacatgaagcagcacgacttctttaagtcagccatgcccgaagggtacgtgcaggaacgtaccattttcttcaaagatgatggaaattataagacccgagccgaggtcaaattcgagggggacacattggtcaatcgtattgagctgaaggggattgatttcaaggaggacgggaatattctcggccataaacttgaatacaattataacagccataatgtttacattatggctgacaaacaaaaaaatggtataaaggtcaacttcaagatccgtcacaacattgaggacggatctgtgcagttggccgaccattaccaacagaacacccctatcggcgatggtccggtattattaccggacaatcactatctctctactcaatcggctctgtcgaaagatccgaatgagaagagagaccacatggtcctcctcgaatttgtgaccgcggccgggatcactttgggcatggatgaactttataagaggtcgcgggacatcagccatggatttcctccggcggtggccgcacaggatgatgggacgctgccgatgtcatgcgcgcaggagtctgggatggacagacatcctgccgcatgcgcatcggcgcgcatcaacgtgtga

SEQ ID NO: 728 - DNA, 855 bp, Artificial Sequence
  Modified Open Reading Frame
atggtttctaaaggcgaggagttgtttaccggcgtggtccctattctcgttgagctcgatggggatgttaacgggcataagttctcggtgagtggtgaaggcgagggcgatgccacatatggcaagcttaccctgaagttcatatgtactacagggaagctgccggtgccctggcctacactagtcaccactctaacgtatggagtgcagtgcttcagccggtacccggaccatatgaagcagcacgacttttttaagtcggccatgcccgaagggtatgtgcaagagcgtaccatcttctttaaggatgatggtaactacaagacgcgagctgaagtaaagttcgagggcgatacgctcgttaaccgcatcgagctcaagggaatagatttcaaggaggatggaaacatcctcggacacaagctggaatataattacaactcccacaacgtttatatcatggcggacaagcagaagaatggaattaaggttaatttcaaaattcggcataacatagaggacggaagcgtgcagctggcggatcattaccagcagaacacgcccatcggtgatgggcctgttctgctgcctgataatcactacctctcaacgcaatctgcgttgagtaaggacccgaacgaaaagagagaccacatggtcctcttggagttcgttactgccgcgggaattacgcttggtatggacgagctatacaagcgtagccgtgacattagtcacggcttcccgccggcagtagccgcccaggacgatggcacgcttccaatgtcctgtgcacaggaaagcgggatggaccgccatcccgctgcctgtgcgtccgccagaataaacgtttga

SEQ ID NO: 729 - DNA, 855 bp, Artificial Sequence
  Modified Open Reading Frame
atggtatcaaaaggagaggagctcttcaccggcgttgttcctatcctggtggagctggacggcgacgtgaacggccacaagttcagcgtgtccggtgagggcgaaggcgatgctacctatggcaagctgaccttgaagttcatctgcaccaccggcaaactgccggtgccgtggcccacgctggtcaccaccctgacttacggagtccagtgcttcagtcggtaccccgaccacatgaagcagcacgacttcttcaagtcggccatgccagagggctacgtgcaggaaagaaccatcttctttaaggacgacggtaactataagactagagccgaggtcaagttcgagggtgacaccctcgtgaacagaatcgagctgaagggcatcgacttcaaagaggacggtaatatcctgggccacaagctggagtacaactacaacagccacaacgtgtacattatggcggacaaacagaagaacggcataaaggtgaactttaagatcagacacaacatagaggacggcagcgtgcagcttgccgaccactatcagcagaacacgcccatcggcgatgggcctgtactgctgccagataaccattatctgagcacgcagagcgccctctccaaggaccctaacgagaagagagatcacatggtgctgctcgagttcgttaccgccgccggcatcaccctgggtatggacgagctgtacaagaggtcccgagacatcagccacggctttcctccagccgtggcagcacaggacgacgggactctgcccatgagctgcgctcaggagtccggcatggacagacatcccgctgcctgtgccagcgcaaggatcaatgtgtaa

SEQ ID NO: 730 - DNA, 855 bp, Artificial Sequence
  Modified Open Reading Frame
atggtatcaaaaggagaggagctcttcaccggcgttgttcctatcctggtggagctggacggcgacgtgaacggccacaagttcagcgtgtccggtgagggcgaaggcgacgccacctatggcaagctgaccttgaagttcatctgcaccaccggcaaactgccggtgccgtggcccacgctggtcaccaccctgacttacggagtccagtgcttcagtcggtaccccgaccacatgaagcagcacgacttcttcaagtcggccatgccagagggctacgtgcaggaaagaaccatcttctttaaggacgacggtaactataagactagagccgaggtcaagttcgagggtgacaccctcgtgaacagaatcgagctgaagggcatcgacttcaaagaggacggtaatatcctgggccacaagctggagtacaactacaacagccacaacgtgtacatcatggccgacaaacagaagaacggcatcaaggtgaactttaagatcagacacaacatagaggacggcagcgtgcagcttgccgaccactatcagcagaacacgcccatcggcgatgggcctgtactgctgccagataaccattatctgagcacgcagagcgccctctccaaggaccctaacgagaagagagatcacatggtgctgctcgagttcgttaccgccgccggcatcaccctgggtatggacgagctgtacaagaggtcccgagacatcagccacggctttcctccagccgtggcagcacaggacgacgggactctgcccatgagctgcgctcaggagtccggcatggacagacatcccgctgcctgtgccagcgcaaggatcaatgtgtaa

SEQ ID NO: 731 - DNA, 855 bp, Artificial Sequence
  Modified Open Reading Frame
atggtatcaaaaggagaggagctgttcaccggcgttgttcctatcctggtggagctggacggcgacgtgaacggccacaagttcagcgtgtccggtgagggcgaaggcgacgccacctatggcaagctgaccttgaagttcatctgcaccaccggcaaactgcccgtgccgtggcccacgctggtcaccaccctgacttacggagtccagtgcttcagtaggtaccccgaccacatgaagcagcacgacttcttcaagtcggccatgcccgagggctacgtgcaggaaagaaccatcttctttaaggacgacggtaactataagactagagccgaggtcaagttcgagggtgacaccctcgtgaacagaatcgagctgaagggcatcgacttcaaagaggacggtaatatcctgggccacaagctggagtacaactacaacagccacaacgtgtacatcatggccgacaaacagaagaacggcatcaaggtgaactttaagatcagacacaacatcgaggacggcagcgtgcagcttgccgaccactaccagcagaacacgcccatcggcgatgggcctgtactgctgccagataaccattatctgagcacgcagagcgccctctccaaggaccctaacgagaagagagatcacatggtgctgctcgagttcgttaccgccgccggcatcaccctgggtatggacgagctgtataagaggtcccgagacatcagccacggctttcctccagccgtggcagcacaggacgacgggactctgcccatgagctgcgctcaggagtccggcatggacagacatcccgctgcctgtgccagcgccaggatcaacgtgtaa

SEQ ID NO: 732 - DNA, 855 bp, Artificial Sequence
  Modified Open Reading Frame
atggtatcaaagggagaggagctgttcacaggcgtcgtccccatattggtggagctggacggcgacgtgaacggacacaagttttctgtgtcgggggagggcgagggcgacgcgacgtacgggaagcttaccctgaagttcatctgcactacgggtaagcttcctgtgccctggcccactttggtaaccacactgacgtatggcgttcagtgcttctcgcggtatcccgatcacatgaagcagcatgacttcttcaaatcggcgatgcctgagggttatgtccaggagcgtaccatcttctttaaggacgatggcaattacaagacccgggccgaggtgaagttcgagggcgacaccttggtgaaccggatcgagttaaagggcatcgactttaaagaggatggtaatatcctgggccataagttggaatacaactataactctcacaatgtctacattatggcagacaagcagaagaatggtatcaaagtgaacttcaaaatccggcacaatattgaagacggttccgttcagctcgccgatcattaccagcagaatacaccgattggggacggcccggtgctcctgccggacaatcattacctgtcgactcaatcggcactgtccaaggatcccaacgagaagcgtgatcacatggttctgttggagtttgtgacggccgccggcatcacactgggcatggacgagctgtacaaacgatcccgggacatcagccacggctttccgccggccgtggctgcccaggatgatgggacgttgccgatgagttgcgcacaggagtccggcatggacagacacccggccgcctgtgccagcgcacggataaacgtgtaa

SEQ ID NO: 733 - DNA, 855 bp, Artificial Sequence
  Modified Open Reading Frame
atggtatcaaagggagaggagctgttcacaggcgtcgtccccatattggtggagctggacggcgacgtgaatggacacaagttttctgtgtcgggggagggcgagggcgacgcgacgtacgggaagcttaccctgaagttcatctgcactacgggtaagcttcctgtgccctggcccactttggtaaccacactgacgtatggcgttcagtgcttctcgcggtatcccgatcacatgaagcagcatgacttcttcaaatcggcgatgcctgagggttatgtccaggagcgtaccatcttctttaaggacgatggcaattacaagacccgggccgaggtgaagttcgagggcgacaccttggtgaaccggatcgagttaaagggcatcgactttaaagaggatggtaatatcctgggccataagttggaatacaactataactctcacaatgtctacattatggcagacaagcagaagaatggtatcaaagtgaacttcaaaatccggcacaatattgaagacggttccgttcagctcgccgatcattaccagcagaatacaccgattggggacggcccggtgctcctgccggacaatcattacctgtcgactcaatcggcactgtccaaggatcccaacgagaagcgtgatcacatggttctgttggagtttgtgacggccgccggcatcacactgggcatggacgagctgtacaaacgatcccgggacatcagccacggctttccgccggccgtggctgcccaggatgatgggacgttgccgatgagttgcgcacaggagtccggcatggacagacacccggccgcctgtgccagcgcacggataaacgtgtaa

SEQ ID NO: 734 - DNA, 855 bp, Artificial Sequence
  Modified Open Reading Frame
atggtatcaaagggagaggagctgttcacaggcgtcgtccccatattggtggagctggacggcgacgtgaatggacacaagttttctgtgtcgggggagggcgagggcgacgcgacgtacgggaagcttaccctgaagttcatctgcactacgggtaagcttcctgtgccctggcccactttggtaaccacactgacgtatggcgttcagtgcttctcgcggtatcccgatcacatgaagcagcatgacttcttcaaatcggcgatgcctgagggttatgtccaggagcgtaccatcttctttaaggacgatggcaattacaagacccgggccgaggtgaagttcgagggcgacaccttggtgaaccggatcgagttaaagggcatcgactttaaagaggatggtaatatcctgggccataagttggaatacaactataactctcacaatgtctacattatggcagacaagcagaagaatggtatcaaagtgaacttcaaaatccggcacaatattgaagacggttccgttcagctcgccgatcattaccagcagaatacaccgattggggacggcccggtgctcctgccggacaatcattacctgtcgactcaatcggcactgtccaaggatcccaacgagaagcgtgatcacatggttctgttggagtttgtgacggccgccggcatcacactgggcatggacgagctgtacaaacgatcccgggacatcagccacggctttccgccggccgtggctgcccaggatgatgggacgttgccgatgagttgcgcacaggagtccggcatggacagacacccggccgcctgtgccagcgcacggataaatgtgtaa

SEQ ID NO: 735 - DNA, 855 bp, Artificial Sequence
  Modified Open Reading Frame
atggtatcaaaaggagaggagctgttcaccggcgttgttcctatcctggtggagctggacggcgacgtgaacggccacaagttcagcgtgtccggtgagggcgaaggcgacgccacctatggcaagctgaccttgaagttcatctgcaccaccggcaaactgcccgtgccgtggcccacgctggtgaccaccctgacttacggagtccagtgcttcagtaggtaccccgaccacatgaagcagcacgacttcttcaagtccgccatgcccgagggctacgtgcaggaaagaaccatcttctttaaggacgacggtaactataagactagagccgaggtcaagttcgagggtgacaccctcgtgaacagaatcgagctgaagggcatcgacttcaaagaggacggtaatatcctgggccacaagctggagtacaactacaacagccacaacgtgtacatcatggccgacaaacagaagaacgggatcaaggtgaactttaagatcagacacaacatcgaggacggcagcgtgcagctcgccgaccactaccagcagaacacgcccatcggcgatgggcctgtactgctgccagataaccattatctgagcacgcagagcgccctctccaaggaccctaacgagaagagagatcacatggtgctgctcgagttcgttaccgccgccggcatcaccctgggtatggacgagctgtacaagaggtcccgagacatcagccacggctttcctccagccgtggccgcacaggacgacgggactctgcccatgagctgcgctcaggagtccggcatggacagacatcccgctgcctgtgccagcgccaggatcaacgtgtaa

SEQ ID NO: 736 - DNA, 855 bp, Artificial Sequence
  Modified Open Reading Frame
atggtatcaaagggagaggagctgttcacaggcgtcgtccccatattggtggagctggacggcgacgtgaatggacacaagttttctgtgtcgggggagggcgagggcgacgcgacgtacgggaagcttaccctgaagttcatctgcactacgggtaagcttcctgtgccctggcccactttggtaaccacactgacgtatggcgttcagtgcttctcgcggtatcccgatcacatgaagcagcatgacttcttcaaatcggcgatgcctgagggttatgtccaggagcgtaccatcttctttaaggacgatggcaattacaagacccgggccgaggtgaagttcgagggcgacaccttggtgaaccggatcgagttaaagggcatcgactttaaagaggatggtaatatcctgggccataagttggaatacaactataactctcacaatgtctacattatggcagacaagcagaagaatggtatcaaagtgaacttcaaaatccggcacaatattgaagacggttccgttcagctcgccgatcattaccagcagaatacgccgattggggacggcccggtgctcctgccggacaatcattacctgtcgactcaatcggcactgtccaaggatcccaacgagaagcgtgatcacatggttctgttggagtttgtgacggccgccggcatcacactgggcatggacgagctgtacaaacgatcccgggacatcagccacggctttccgccggccgtggctgcccaggatgatgggacgttgccgatgagttgcgcacaggagtccggcatggacagacacccggccgcctgtgccagcgcacggataaatgtgtaa

SEQ ID NO: 737 - DNA, 855 bp, Artificial Sequence
  Modified Open Reading Frame
atggtatcaaaaggagaggagctgttcaccggcgttgttcctatcctggtggagctggacggcgacgtgaacggccacaagttcagcgtgtccggcgagggcgaaggcgacgccacctatggcaagctgaccttgaagttcatctgcaccaccggcaaactgcccgtgccgtggcccacgctggtgaccaccctgacttacggagtccagtgcttcagcagataccccgatcacatgaagcagcacgacttcttcaagtccgccatgcccgagggctacgtgcaggaaagaaccatcttctttaaggacgacggtaactataagaccagagccgaggtgaagttcgagggagacaccctggtgaacagaatcgagctgaagggcatcgacttcaaagaggacggtaacatcctgggccacaaactggagtacaactacaacagccacaacgtgtacatcatggccgacaaacagaagaacgggatcaaggtgaactttaagatcagacacaacatcgaggacggcagcgtgcagctcgccgaccactaccagcagaacacgcccatcggcgacgggcccgtactgctgccagataaccattatctgagcacgcagagcgccctgtccaaggaccctaacgagaagagagatcacatggtgctgctcgagttcgttaccgccgccggcatcaccctgggtatggacgagctgtacaagaggtcccgagacatcagccacggctttcctccagccgtggccgcacaggacgacgggactctgcccatgagctgcgctcaggagtccggcatggacagacatcccgctgcctgtgccagcgccaggatcaacgtgtaa

SEQ ID NO: 738 - DNA, 855 bp, Artificial Sequence
  Modified Open Reading Frame
atggtatcaaagggagaggagctgttcacaggcgtcgtccccatattggtggagctggacggcgacgtgaatggacacaagttttctgtgtcgggggagggcgagggcgacgcgacgtacgggaagcttaccctgaagttcatctgcactacgggtaagcttcctgtgccctggcccactttggtaaccacactgacgtatggcgttcagtgcttctcgcggtatcctgatcacatgaagcagcatgacttcttcaaatcggcgatgcctgagggttatgtccaggagcgtaccatcttctttaaggacgatggcaattacaagacccgggccgaggtgaagttcgagggcgacaccttggtgaaccggatcgagttaaagggcatcgactttaaagaggatggtaatatcctgggccataagttggaatacaactataactctcacaatgtctacattatggcagacaagcagaagaatggtatcaaagtgaacttcaaaatccggcacaatattgaagacggttccgttcagctcgccgatcattaccagcagaatacgccgattggggacggcccggtgctcctgccggacaatcattacctgtcgactcaatcggcactgtccaaggatcccaacgagaagcgtgatcacatggttctgttggagtttgtgacggccgccggcatcacactgggcatggacgagctgtacaaacgatcccgggacatcagccacggctttccgccggccgtggctgcccaggatgatgggacgttgccgatgagttgcgcacaggagtccggcatggacagacacccggccgcctgtgccagcgcaaggataaatgtataa

SEQ ID NO: 739 - DNA, 855 bp, Artificial Sequence
  Modified Open Reading Frame
atggtatcgaagggcgaggagctctttacaggcgtcgtgcctatcctggtggagctggacggcgacgtgaacggccacaagtttagcgtgtccggagagggcgaaggggatgccacgtatggcaagctgaccttgaagttcatctgtaccacgggcaaactgcccgtgccgtggccgaccctggtgaccaccctcacctacggggtccagtgcttcagcaggtaccccgaccacatgaagcagcacgacttcttcaagtccgccatgcccgagggctacgtccaggaaagaaccatcttctttaaggacgatggaaactataagacccgagccgaggtgaagttcgagggtgacaccctggtgaaccgcatcgagctcaagggcatcgactttaaagaggatggtaatatcctgggccacaagctggagtacaactacaacagccacaatgtgtacatcatggcggacaagcagaagaacggtatcaaggtgaactttaagatcagacacaacatcgaggacggcagcgtgcagctcgccgatcactaccagcagaacacaccgatcggcgacggccccgtgctgctgcccgataaccattatctgagcacccagagcgccctctccaaggaccctaacgagaagagggatcacatggtgctcctcgagttcgttaccgccgccggcatcaccctgggcatggacgagctgtacaagagatctcgggacattagccacggctttcctccagccgtggccgcacaggacgacgggacgctgcccatgagctgcgctcaggagtccggcatggacagacatcccgccgcctgtgcgagcgcaagaatcaatgtgtaa

SEQ ID NO: 740 - DNA, 855 bp, Artificial Sequence
  Modified Open Reading Frame
atggtatcaaaaggagaagagctgtttaccggggttgtgcccatcttggtggagctggacggtgatgtcaatggccataagttcagcgtcagcggggagggagaaggcgacgcgacgtacgggaagctgacgttgaaattcatctgcacgacgggcaaactgcccgtcccgtggccgactctcgttaccaccctcacgtacggcgtgcagtgcttctcccgctaccctgatcacatgaagcagcatgacttcttcaaaagtgctatgcccgaaggttatgtgcaggagaggaccatcttctttaaggacgatggcaactacaagacccgggcagaggtcaaatttgagggagacacgctcgtgaaccggattgagcttaagggcattgacttcaaagaggacggcaacatccttgggcacaaactcgagtacaactacaactcgcataacgtgtacattatggcggacaagcagaagaacggtatcaaagtaaactttaagatacggcacaacattgaggacgggtccgtacagctggctgaccactatcagcagaatacacctatcggggacggaccagtcctcctccccgataatcattacctgagtactcagtcagctctctccaaggaccccaatgagaagcgagatcacatggtgctgttggagttcgtgacggcggcggggatcacgctggggatggacgagctctacaaaaggagccgcgacatctctcacgggttcccccccgccgtcgcagcccaagacgacggcaccctgccgatgtcgtgtgctcaggagagtggtatggaccgtcatcctgctgcgtgcgccagtgcacgtataaatgtgtga

SEQ ID NO: 741 - DNA, 855 bp, Artificial Sequence
  Modified Open Reading Frame
atggtatcgaagggggaggagctctttacaggcgtcgtgcctatcctggtggagctggacggcgacgtgaacggccacaagtttagcgtgtccggagagggcgaaggggatgccacgtatggcaagctgaccttgaagttcatctgtaccacgggcaaactgcccgtgccgtggccgaccctggtgaccaccctcacctacggggtccagtgcttcagcaggtaccccgaccacatgaagcagcacgacttcttcaagtccgccatgcccgagggctacgtccaggaaagaaccatcttctttaaggacgatggaaactataagacccgagccgaggtgaagttcgagggtgacaccctggtgaaccgcatcgagctcaagggcatcgactttaaagaggatggtaatatcctgggccacaagctggagtacaactacaacagccacaatgtgtacatcatggcggacaagcagaagaacggtatcaaggtgaactttaagatcagacacaacatcgaggacggcagcgtgcagctcgccgatcactaccagcagaacacaccgatcggcgacggccccgtgctgctgcccgataaccattatctgagcacccagagcgccctctccaaggaccctaacgagaagagggatcacatggtgctcctcgagttcgttaccgccgccggcatcaccctgggcatggacgagctgtacaagagatctcgggacattagccacggctttcctccagccgtggccgcacaggacgacgggacgctgcccatgagctgcgctcaggagtccggcatggacagacatcccgccgcctgtgcgagcgcaagaatcaatgtgtaa

SEQ ID NO: 742 - DNA, 855 bp, Artificial Sequence
  Modified Open Reading Frame
atggttagcaaaggagaagaactattcacaggcgtggtgccgattctggtggagctggacggcgacgtgaacggacacaagttctcggtgagtggcgaaggcgaaggcgacgccacgtacgggaagcttaccctgaaattcatctgtaccacgggtaagcttcctgtaccgtggccgaccttggtgaccactctgacttatggcgtgcagtgcttcagtcggtaccccgaccacatgaagcagcacgacttcttcaagtcggccatgcctgaaggatatgtccaggaaaggaccatattcttcaaggatgacggcaattataagacgcgtgcggaagtcaagtttgaaggcgatacccttgtcaatagaattgagctcaagggtatcgacttcaaagaggacggtaatatactcgggcacaagctcgagtataattacaattcccacaacgtctatataatggccgacaagcagaagaatggcatcaaggtcaactttaagattcgccacaacatcgaggacgggtccgttcagctcgccgaccactaccagcagaatacaccaattggtgacggccccgtgttacttcccgataatcattatcttagcacgcagtcagcgctgtcgaaggacccgaatgagaagcgcgaccatatggtgcttctagagttcgtcactgccgcagggataaccctcggcatggacgagctctacaagcgtagtcgcgacatctcacacgggttcccgccagcggtggctgcgcaagatgatggcacgttgccgatgagctgcgcgcaggagtccggcatggatagacatcctgccgcctgcgccagcgctcggatcaacgtgtaa

SEQ ID NO: 743 - DNA, 855 bp, Artificial Sequence
  Modified Open Reading Frame
atggttagcaaaggagaggaactgttcacaggcgtggtgccgattctggtggagctggacggcgacgtgaacggacacaagttctcggtgagtggcgaaggcgaaggcgacgccacgtacgggaagcttaccctgaaattcatctgtaccacgggtaagcttcctgtaccgtggccgaccttggtgaccactctgacttatggcgtgcagtgcttcagtcggtaccccgaccacatgaagcagcacgacttcttcaagtcggccatgcctgaaggatatgtccaggaaaggaccatattcttcaaggatgacggcaattataagacgcgtgcggaagtcaagtttgaaggcgatacccttgtcaatagaattgagctcaagggtatcgacttcaaagaggacggtaatatactcgggcacaagctcgagtataattacaattcccacaacgtctatataatggccgacaagcagaagaatggcatcaaggtcaactttaagattcgccacaacatcgaggacgggtccgttcagctcgccgaccactaccagcagaatacaccaattggtgacggccccgtgttactgccggacaatcattatcttagcacgcagtcagcgctgtcgaaggacccgaatgagaagcgcgaccatatggtgcttctagagttcgtcactgccgcagggataaccctcggcatggacgagctctacaagcgtagtcgcgacatctcacacgggttcccgccagcggtggctgcgcaagatgatggcacgttgccgatgagctgcgcgcaggagtccggcatggatagacatcctgccgcctgcgccagcgctcggatcaacgtgtaa

SEQ ID NO: 744 - DNA, 855 bp, Artificial Sequence
  Modified Open Reading Frame
atggtatcaaagggagaagagttgttcaccggcgtggtgccaatactggtagagctggatggggacgtgaacggacataagttcagcgtgtccggtgagggtgagggtgatgccacctatggcaaactcaccctcaagttcatctgcaccaccggtaaactgccagtgccttggcccacgctggtaacaactcttacatatggcgtgcagtgcttttcacgttatccagatcacatgaaacagcacgatttctttaagtccgccatgcccgagggttacgtccaggaaagaaccatcttctttaaggacgacggtaattataaaacgcgtgctgaggtcaaattcgagggtgataccctcgtgaaccgaatcgagctgaagggcatcgatttcaaagaagatggtaatatcctgggccacaaactcgagtataactataacagccacaatgtgtacatcatggctgataagcagaagaacgggatcaaagtgaactttaaaattcgccataatatagaggacggcagcgtgcagctcgccgaccactatcaacaaaacactcctattggcgacggtcccgttcttctgccggacaaccattacctgtccacccagagcgctttgtcgaaggaccccaacgaaaagcgtgatcatatggttttgctcgagtttgtgactgccgcaggcataaccctgggcatggacgagctttataagagatcgcgcgacataagccacggctttccgccagcggtagcagcgcaagacgacgggaccctgcccatgagctgcgctcaggagtccggcatggacaggcaccccgctgcctgcgcttccgcgcggatcaacgtgtag

SEQ ID NO: 745 - DNA, 855 bp, Artificial Sequence
  Modified Open Reading Frame
atggtatcaaagggagaagagttgttcaccggcgtggtcccaatactggtagagctggacggggacgtgaacggacataagttcagcgtgtccggcgagggtgagggagatgccacctatggcaaactcaccctcaagtttatctgtaccacaggtaaactgccagtgccttggcccacgttggtgacaactcttacatatggcgtgcaatgcttttcaaggtatccagaccatatgaaacagcatgatttcttcaagtccgccatgcctgaagggtacgtccaggaaagaaccatcttctttaaggacgacggtaattataaaacgcgtgctgaggtcaaattcgagggtgataccctcgtgaaccgaatcgagctgaaaggcatcgacttcaaagaagatggtaatatcctgggccacaaactcgagtacaactacaacagtcacaatgtgtatattatggcggataagcagaaaaatggtattaaagtaaactttaaaatccgccataatatagaggacggcagcgtacagctagcagaccattatcaacagaatacacctattggtgatggtcctgtactgctgccggacaatcattatttgtccacgcaaagcgctttgtcgaaggatcccaacgaaaagcgtgatcatatggtactactcgagtttgtaactgccgcaggcattaccctaggcatggacgagctttacaagagatcgcgcgacataagccacggatttccgccagcggtagccgcgcaggacgacgggaccctgcccatgagctgtgctcaggagtccggcatggacaggcatcccgccgcctgcgcgtccgcgcggataaacgtgtag

SEQ ID NO: 746 - DNA, 855 bp, Artificial Sequence
  Modified Open Reading Frame
atggtatcaaagggagaggagctgttcacaggcgtcgtccccatattggtggagctggacggcgatgtgaatggacacaagttttctgtgtcgggggagggcgagggcgacgcgacgtacgggaagcttaccctgaagttcatctgcactacgggtaagcttcctgtgccctggcccactttggtaaccacactgacgtacggcgtgcagtgcttctcgcggtatcctgatcacatgaaacagcacgactttttcaaatcggccatgcctgagggttatgtccaggagcggaccatcttctttaaggacgatggcaattacaagacccgggccgaggtgaagttcgagggcgacaccttggtgaaccggatcgagctgaagggcatcgactttaaggaggatggtaacatcctgggccacaagttggaatacaactataactctcacaatgtctacatcatggcagacaagcagaagaatggtatcaaagtgaacttcaagatccggcacaatattgaagacggttccgttcagctcgccgaccactaccagcagaatacgccgattggggacggcccggtgctactgccggacaatcattacctgtcgactcagtcggcactgtccaaggatcccaacgagaagcgtgatcacatggttctgttggagtttgtgacggccgccggcatcaccctgggcatggacgagctgtacaaacgatcccgggacatcagccacggctttccgccggccgtggctgcccaggatgatgggacgttgccgatgagttgcgcacaggagtccggcatggacagacacccggccgcctgtgccagcgcaaggataaatgtataa

SEQ ID NO: 747 - DNA, 855 bp, Artificial Sequence
  Modified Open Reading Frame
atggtatcaaagggagaggagctgttcacaggcgtcgtccccatattggtggagctggacggcgatgtgaatggacacaagttttctgtgtcgggggagggcgagggcgacgcgacgtacgggaagcttaccctgaagttcatctgcactacgggtaagcttcctgtgccctggcccactttggtaaccacactgacgtacggcgtgcagtgcttctcgcggtatcctgatcacatgaaacagcacgactttttcaaatcggccatgcctgagggttatgtccaggaacgtaccatcttctttaaggacgatggcaattacaagacccgggccgaggtgaagttcgagggcgacaccttggtgaaccggatcgagctgaagggcatcgactttaaggaggatggtaacatcctgggccacaagttggaatacaactataactctcacaatgtctacatcatggcagacaagcagaagaatggtatcaaagtgaacttcaagatccggcacaatattgaagacggttccgttcagctcgccgaccactaccagcagaacacgccgattggggacggcccggtgctactgccggacaatcattacctgtcgactcagtcggcactgtccaaggatcccaacgagaagcgtgatcacatggttctgttggagtttgtgacggccgccggcatcaccctgggcatggacgagctgtacaaacgatcccgggacatcagccacggctttccgcccgccgtggctgcccaggatgatgggacgctgccgatgagctgcgcacaggagtccggcatggacagacaccccgccgcctgtgccagcgcaaggataaatgtataa

SEQ ID NO: 748 - DNA, 855 bp, Artificial Sequence
  Modified Open Reading Frame
atggtatcaaaaggagaagaactattcactggggtagtgccgatacttgttgagcttgacggtgacgtgaacggccacaaatttagcgtcagtggggagggtgaaggggatgcgacttacggcaagctgaccttgaagttcatatgtactacagggaagttgcccgttccctggccgaccctcgtcaccacgctgacttacggagtccagtgcttcagtcggtaccccgaccacatgaagcaacatgacttcttcaagtcggcgatgccggaggggtacgtccaggagcggacaatcttctttaaagacgatgggaactacaagactcgtgcggaggtgaagtttgagggagacactcttgtgaatcgaatagagttgaaaggtatcgacttcaaagaggacggcaatattctaggccataagttggagtacaattacaacagccataacgtctacatcatggcggacaagcagaagaatggtatcaaagtcaactttaagattcgtcacaacatagaggacggctctgtccaactcgccgaccactatcagcagaataccccgataggcgacggacccgttttactgcccgacaatcactatctaagcacccagtccgctctgtcaaaggaccccaacgagaagcgggaccacatggtcctgctggagttcgtgacggcggcgggtattacgttagggatggacgagctgtataaacgttcgcgcgatatcagccatggttttccgccggcagtcgcagcccaagacgacggcaccctccccatgtcgtgcgctcaggagtcgggcatggaccgccaccccgcagcatgtgccagcgctcgcatcaatgtatag

SEQ ID NO: 749 - DNA, 855 bp, Artificial Sequence
  Modified Open Reading Frame
atggtatcaaagggagaagagttgttcaccggcgtggtcccaatactggtagagctggacggggacgtgaacggacataagttcagcgtgtccggcgagggtgagggcgatgccacctatggcaagctcaccctgaagtttatctgtaccacaggtaaactgccagtgccttggcccacgttggtgacaactctgacatatggcgtgcaatgcttttcaaggtatccagaccatatgaaacagcatgatttcttcaagtccgccatgcctgaagggtacgtccaggaaagaaccatcttctttaaggacgacggaaattataaaacgcgtgctgaggtcaaattcgagggtgataccctcgtgaaccgaatcgagctgaaaggcatcgacttcaaggaagatggtaatatcctgggccacaaactcgagtataattacaacagtcacaatgtgtatattatggccgataaacagaaaaatgggatcaaagtaaactttaagatccggcataatatcgaggacggcagcgtgcaactcgccgatcattatcaacaaaatacaccgatcggcgatggtcccgtgctgctgcccgataaccattatctgagtacccaatccgctttgtcgaaggatcccaatgagaagcgtgatcatatggtactactcgagtttgtaactgccgcaggcattaccctaggcatggacgagctttacaagagatcgcgcgacataagccacggatttccgccagcggtagccgcgcaggacgacgggaccctgcccatgagctgtgctcaggagtccggcatggacaggcatcccgccgcctgcgcgtccgcgcggataaacgtgtag

SEQ ID NO: 750 - DNA, 855 bp, Artificial Sequence
  Modified Open Reading Frame
atggtatcaaaaggcgaggagctgttcacaggtgtcgtccccatattggtggagctggacggcgatgtgaatggacacaagttttctgtgtcgggggagggcgagggcgacgcgacgtacgggaagcttaccctgaagttcatctgcactacgggtaagcttcctgtgccctggcccactttggtaaccacactgacgtacggcgtgcagtgcttctcgcggtatcctgatcacatgaaacagcacgactttttcaaatcggcgatgcctgagggttatgtccaggaacgtaccatcttctttaaggacgatggcaattacaagacccgggccgaggtgaagttcgagggcgacaccttggtgaaccggatcgagctgaagggcatcgactttaaggaggatggtaacatcctgggccacaagttggaatacaactataactctcacaatgtctacatcatggcagacaagcagaagaatggtatcaaagtgaacttcaagatccggcacaatattgaagacggttccgttcagctcgccgaccactaccagcagaacacgccgattggggacggcccggtactactgccggataatcattatttgtcgactcagtcggcactgtccaaggatcccaacgagaagcgtgatcacatggttctgttggagtttgtgacggccgccggcatcacgctgggcatggacgagctgtacaaacgatcccgggacatcagccacggctttcctcccgccgtggctgcccaagacgacgggaccctacccatgagctgcgcacaggagtccggcatggacagacaccccgccgcctgtgccagcgcaaggataaatgtataa

SEQ ID NO: 751 - DNA, 855 bp, Artificial Sequence
  Modified Open Reading Frame
atggtatcaaaaggcgaggaactgttcacaggtgtcgtccccatattggtggagctggacggcgatgtgaatggacacaagttttctgtgtcgggggagggcgagggcgacgcgacgtacgggaagcttaccctgaagttcatctgcactacgggtaagcttcctgtgccctggcccactttggtaaccacactgacgtacggcgtgcagtgcttctcgcggtatcctgatcacatgaaacagcacgactttttcaaatcggcgatgcctgagggttatgtccaggaacgtaccatcttctttaaggacgatggcaattacaagacccgggccgaggtgaagttcgagggcgacaccttggtgaaccggatcgagctgaagggcatcgactttaaggaggatggtaacatcctgggccacaagttggaatacaactataactctcacaatgtctacatcatggcagacaagcagaagaatggtatcaaagtgaacttcaagatccggcacaatattgaagacggttccgttcagctcgccgaccactaccagcagaacacgccgattggggacggcccggtactactgccggataatcattatttgtcgactcagtcggcactgtccaaggatcccaacgagaagcgtgatcacatggttctgttggagtttgtgacggccgccggcatcacgctgggcatggacgagctgtacaaacgatcccgggacatcagccacggctttcctcccgccgtggctgcccaagacgacgggaccctacccatgagctgcgcacaggagtccggcatggacagacaccccgccgcctgtgccagcgcaaggataaatgtataa

SEQ ID NO: 752 - DNA, 855 bp, Artificial Sequence
  Modified Open Reading Frame
atggtgtccaagggcgaggagctgttcaccggcgtggtgcctatcctggtggagctggacggcgacgtgaacggccacaagtttagcgtgtccggcgagggcgaaggcgacgccacctacggcaagctgaccctgaagttcatctgcaccaccggcaaactgcccgtgccctggcccaccctcgtgacaaccctgacctacggagtccagtgcttcagcagataccccgaccacatgaagcagcacgacttcttcaagtccgccatgcccgagggctacgtgcaggaaagaaccatcttctttaaggacgacggaaactataagaccagagccgaggtgaagttcgagggagacaccctggtgaacagaatcgagctgaagggcatcgacttcaaagaggacggcaacatcctgggccacaagctggagtacaactacaacagccacaacgtgtacatcatggccgacaaacagaagaacgggatcaaggtgaactttaagatcagacacaacatcgaggacggcagcgtgcagctcgccgaccactaccagcagaacacacccatcggcgacggacccgtgctgctgcccgacaaccattacctgagcacccagagcgccctgtccaaggaccctaacgagaagagagatcacatggtgctgctcgagttcgtgaccgccgccggcatcaccctgggcatggacgagctgtacaagagatcccgcgacattagccacggctttcctccggccgtggccgcccaagacgacgggaccctgcccatgagctgcgcccaggagtccggcatggacagacaccccgccgcctgtgccagcgccaggatcaacgtgtaa

SEQ ID NO: 753 - DNA, 855 bp, Artificial Sequence
  Modified Open Reading Frame
atggtatcaaaaggagaagaactattcactggggtagtgccgatacttgttgagcttgacggtgacgtgaacggccacaaatttagcgtcagtggggagggtgaaggggatgcgacttacggcaagctgaccttgaagttcatatgtactacagggaagttgcccgttccctggccgaccctcgtcaccacgctgacttacggagtccagtgcttcagtcggtaccccgaccacatgaagcaacatgacttcttcaagtcggcgatgccggaggggtacgtccaggagcggacaatcttctttaaagacgatgggaactacaagactcgtgcggaggtgaagtttgagggtgacactcttgtgaatcgaatagagctcaaaggtatcgacttcaaagaggacggcaatattctaggccataagttggagtacaattacaacagccataacgtctacatcatggcggacaagcagaagaatggtatcaaagtgaactttaagattcgtcacaacatagaggacggctctgtgcaactcgccgaccactatcagcagaataccccgataggcgacggacccgttttactgcccgacaatcactatctaagcacccagtccgctctgtcaaaggaccccaacgagaagcgggaccacatggtcctgctggagttcgtgacggcggcgggtattacgttagggatggacgagctgtataaacgttcgcgcgatatcagccatggttttccgccggcagtcgcagcccaagacgacggcaccctccccatgtcgtgcgctcaggagtcgggcatggaccgccaccccgcagcatgtgccagcgctcgcatcaatgtatag

SEQ ID NO: 754 - DNA, 855 bp, Artificial Sequence
  Modified Open Reading Frame
atggtatcaaaaggagaagaactattcactggggtagtgccgatacttgttgagcttgacggtgacgtgaacggccacaaatttagcgtcagtggggaaggtgaaggggatgcgacttacggcaagctgaccttgaagttcatatgtactacagggaagttgcccgttccctggccgaccctcgtcaccacgctgacttacggagtccagtgcttcagtcggtaccccgaccacatgaagcaacatgacttcttcaagtcggcgatgccggaggggtacgtccaggagcggacaatcttctttaaagacgatgggaactacaagactcgtgcggaggtgaagtttgagggtgacactcttgtgaatcgaatagagctcaaaggtatcgacttcaaagaggacggcaatattctaggccataagttggagtacaattacaacagccataacgtctacatcatggcggacaagcagaagaatggtatcaaagtgaactttaagattcgtcacaacatagaggacggctctgtccaactcgccgaccactatcagcagaataccccgataggcgacggacccgttttactgcccgacaatcactatctaagcacccagtccgctctgtcaaaggaccccaacgagaagcgggaccacatggtcctgctggagttcgtgacggcggcgggtattacgttagggatggacgagctgtataaacgttcgcgcgatatcagccatggttttccgccggcagtcgcagcccaagacgacggcaccttgcccatgtcgtgcgctcaggagtcgggcatggaccgccaccccgcagcatgtgccagcgctcgcatcaatgtatag

SEQ ID NO: 755 - DNA, 855 bp, Artificial Sequence
  Modified Open Reading Frame
atggtgtcaaaaggagaggagctgttcaccggtgtggtgcctattctggtggagctggacggcgacgtgaacggacacaagttctcggtgagtggcgaaggtgaaggcgacgccacgtacgggaagcttaccctgaaattcatctgtaccacgggtaagcttcctgtaccgtggccgaccttggtgaccactctgacttacggcgtgcagtgcttcagtcggtaccccgaccacatgaagcagcacgacttcttcaagtcggctatgcccgaagggtatgtccaagagcgtaccatcttctttaaagacgatggcaattacaagacccgggccgaggtgaagttcgagggcgacaccttggtgaaccggatcgagctgaagggcatcgactttaaggaagatggtaacattcttggacataagttggagtacaactacaatagccataatgtgtacattatggccgataagcagaagaatggcatcaaggtcaacttcaagattcgccacaacatcgaggacgggtccgttcagctcgccgaccactaccagcagaatacacccatcggtgacggccctgtcctgcttccagacaaccattatcttagcacgcagtcagcgctgtcgaaggacccgaatgagaagcgcgaccacatggtgcttctagagttcgtcactgccgcagggatcaccctcggcatggacgagctctacaagcgtagtcgcgacatctcacacgggttcccgccagcggtggctgcgcaagatgatggtacgttgccgatgagctgcgcgcaggagtccggcatggatagacatcctgccgcctgcgccagcgctcggatcaacgtctga

SEQ ID NO: 756 - DNA, 855 bp, Artificial Sequence
  Modified Open Reading Frame
atggtttcaaagggagaagagttattcaccggcgtggtgccgattctggtggagctggacggcgacgtgaacggacacaagttctcggtgagtggcgaaggtgaaggcgacgccacgtacgggaagcttaccctgaaattcatctgtaccacgggtaagcttcctgtaccgtggccgaccttggtgaccactctgacttacggcgtgcagtgcttcagtcggtaccccgaccacatgaagcagcacgacttcttcaagtcggctatgcccgaagggtatgtccaagagcgtaccatcttctttaaagacgatggcaattacaagacccgggccgaggtgaagttcgagggcgacaccttggtgaaccggatcgagctgaagggcatcgactttaaggaagatggtaacattcttggacataagttggagtacaactacaatagccataatgtgtacattatggccgataagcagaagaatggcatcaaggtcaacttcaagattcgccacaacatcgaggacgggtccgttcagctcgccgaccactaccagcagaatacaccaattggtgacggcccagtgttgctgccggacaaccattatcttagcacgcagtcagcgctgtcgaaggacccgaatgagaagcgcgaccacatggtgcttctagagttcgtcactgccgcagggatcaccctcggcatggacgagctctacaagcgtagtcgcgacatctcacacgggttcccgccagcggtggctgcgcaagatgatgggacgttgccgatgagctgcgcgcaggagtccggcatggatagacatcctgccgcctgcgccagcgctcggatcaacgtctaa

SEQ ID NO: 757 - DNA, 855 bp, Artificial Sequence
  Modified Open Reading Frame
atggtgagcaaaggagaagagttatttaccggcgtggtgccgattctggtggagctggacggcgacgtgaacggacacaagttctcggtgagtggcgaaggtgaaggcgacgccacgtacgggaagcttaccctgaaattcatctgtaccacgggtaagcttcctgtaccgtggccgaccttggtgaccactctgacttacggcgtgcagtgcttcagtcggtaccccgaccacatgaagcagcacgacttcttcaagtcggctatgcccgaagggtatgtccaagagcgtaccatcttctttaaagacgatggcaattacaagacccgggccgaggtgaagttcgagggcgacaccttggtgaaccggatcgagctgaagggcatcgactttaaggaagatggtaacattcttggacataagttggagtacaactacaatagccataatgtgtacattatggccgataagcagaagaatggcatcaaggtcaacttcaagattcgccacaacatcgaggacgggtccgttcagctcgccgaccactaccagcagaatacacccattggtgacggcccagtgttgctgccggacaaccattatcttagcacgcagtcagcgctgtcgaaggacccgaatgagaagcgcgaccacatggtgcttctagagttcgtcactgccgcagggatcaccctcggcatggacgagctctacaagcgtagtcgcgacatctcacacgggttcccgccagcggtggctgcgcaagatgatgggacgttgccgatgagctgcgcgcaggagtccggcatggatagacatcctgccgcctgcgccagcgctcggatcaacgtctaa

SEQ ID NO: 758 - DNA, 855 bp, Artificial Sequence
  Modified Open Reading Frame
atggtgagcaagggagaggagttattcacaggcgtggtgcctattctggtggagctggacggcgacgtgaacggacacaagttctcggtgagtggcgaaggtgaaggcgacgccacgtacgggaagcttaccctgaaattcatctgtaccacgggtaagcttcctgtaccgtggccgaccttggtgaccactctgacttacggcgtgcagtgcttcagtcggtaccccgaccacatgaagcagcacgacttcttcaagtcggctatgcccgaagggtatgtccaagagcgtaccatcttctttaaagacgatggcaattacaagacccgggccgaggtgaagttcgagggcgacaccttggtgaaccggatcgagctgaagggcatcgactttaaggaagatggtaacattcttggacataagttggagtacaactacaatagccataatgtgtacattatggccgataagcagaagaatggcatcaaggtcaacttcaagattcgccacaacatcgaggacgggtccgttcagctcgccgaccactaccagcagaatacaccaatcggcgacggccccgtgctgttgccggacaaccattatcttagcacgcagtcagcgctgtcgaaggacccgaatgagaagcgcgaccacatggtgcttctagagttcgtcactgccgcagggatcaccctcggcatggacgagctctacaagcgtagtcgcgacatctcacacgggttcccgccagcggtggctgcgcaagatgatgggacgttgccgatgagctgcgcgcaggagtccggcatggatagacatcctgccgcctgcgccagcgctcggatcaacgtctaa

SEQ ID NO: 759 - DNA, 855 bp, Artificial Sequence
  Modified Open Reading Frame
atggtgtcaaagggagaggagttatttaccggcgtggtgccgattctggtggagctggacggcgacgtgaacggacacaagttctcggtgagtggcgaaggtgaaggcgacgccacgtacgggaagcttaccctgaaattcatctgtaccacgggtaagcttcctgtaccgtggccgaccttggtgaccactctgacttacggcgtgcagtgcttcagtcggtaccccgaccacatgaagcagcacgacttcttcaagtcggctatgcccgaagggtatgtccaagagcgtaccatcttctttaaagacgatggcaattacaagacccgggccgaggtgaagttcgagggcgacaccttggtgaaccggatcgagctgaagggcatcgactttaaggaagatggtaacattcttggacataagttggagtacaactacaatagccataatgtgtacattatggccgataagcagaagaatggcatcaaggtcaacttcaagattcgccacaacatcgaggacgggtccgttcagctcgccgaccactaccagcagaatacaccaatcggcgacggccccgtgctgttgccggacaaccattatcttagcacgcagtcagcgctgtcgaaggacccgaatgagaagcgcgaccacatggtgcttctagagttcgtcactgccgcagggatcaccctcggcatggacgagctctacaagcgtagtcgcgacatctcacacgggttcccgccagcggtggctgcgcaagatgatgggacgttgccgatgagctgcgcgcaggagtccggcatggatagacatcctgccgcctgcgccagcgctcggatcaacgtctaa

SEQ ID NO: 760 - DNA, 855 bp, Artificial Sequence
  Modified Open Reading Frame
atggtatcaaaaggagaagaactattcactggggtagtgccgatacttgttgagcttgacggtgacgtgaacggccacaaatttagcgtcagcggggaaggtgaaggggatgcgacttacggcaaactgaccttgaagttcatatgtactacagggaagttgcccgttccctggccgaccctcgtcaccacgctgacttacggagtccagtgcttcagtcggtaccccgaccacatgaagcaacatgacttcttcaagtcggcgatgccggaggggtacgtccaggagcggacaatcttctttaaagacgatgggaactacaagactcgtgcggaggtgaagtttgagggtgacactcttgtgaatcgaatagagctcaaaggtatcgacttcaaagaggacggcaatattctaggccataagttggagtacaattacaacagccataacgtctacatcatggcggacaagcagaagaatggtatcaaagtgaactttaagattcgtcacaacatagaggacggctctgtccaactcgccgaccactaccaacagaataccccgataggcgacggacccgttttactgcccgacaatcactatctaagcacccagtccgctctgtcaaaggaccccaacgagaagcgggaccacatggtcctgctggagttcgtgacggcggcgggtattacgttagggatggacgagctgtataaacgttcgcgcgatatcagccatggttttccgccggcagtcgcagcccaagacgacggcaccttgcccatgtcgtgcgctcaggagtcgggcatggaccgccaccccgcagcatgtgccagcgctcgcatcaatgtatag

SEQ ID NO: 761 - DNA, 855 bp, Artificial Sequence
  Modified Open Reading Frame
atggtgtccaagggcgaggagctgttcaccggcgtggtgcctatcctggtggagctggacggcgacgtgaacggccacaagtttagcgtgtccggcgagggcgaaggcgacgccacctacggcaagctgaccctgaagttcatctgcaccaccggcaaactgcccgtgccctggcccaccctcgtgaccaccctgacctacggagtccagtgcttcagcagataccccgaccacatgaagcagcacgacttcttcaagtccgccatgcccgagggctacgtgcaggaaagaaccatcttctttaaggacgacggaaactataagaccagagccgaggtgaagttcgagggagacaccctggtgaacagaatcgagctgaagggcatcgacttcaaagaggacggcaacatcctgggccacaaactggagtacaactacaacagccacaacgtgtacatcatggccgacaaacagaagaacgggatcaaggtgaactttaagatcagacacaacatcgaagacggcagcgtgcagctcgccgaccactaccagcagaacacacccatcggcgacggacccgtgctgctgcccgataaccattatctgagcactcagagcgccctgtccaaggaccctaacgaaaagagagaccatatggtactgctcgaatttgttaccgccgccggcatcaccctgggcatggacgagctgtacaagagatcccgcgacatcagccacggctttcctcccgccgtggccgcccaagacgacgggaccctgcccatgagctgcgcccaggagtccggcatggacagacaccccgccgcctgtgccagcgccaggatcaacgtgtaa

SEQ ID NO: 762 - DNA, 855 bp, Artificial Sequence
  Modified Open Reading Frame
atggtgtccaagggcgaggagctgttcaccggcgtggtgcccatcctggtggagctggacggcgacgtgaacggccacaagtttagcgtgtccggcgagggcgaaggcgatgccacctacggcaagctgaccctgaagttcatctgcaccaccggcaaactgcccgtgccgtggcccaccctcgtgaccaccctgacctacggagtccagtgcttcagcagataccccgaccacatgaagcagcacgacttcttcaagtccgccatgcccgagggctacgtccaggaaagaaccatcttctttaaggacgacggaaactataagaccagagccgaggtgaagttcgagggagacaccctagtgaaccgaatcgagctgaaaggcatcgacttcaaagaggacggcaacatcctgggccacaaactggagtataattacaacagccacaacgtgtacatcatggccgacaaacagaagaacgggatcaaggtgaactttaagatcagacacaatatcgaagacggcagcgtgcagctcgccgaccactaccagcagaacacacccatcggcgacgggcccgtgctgctgcccgataaccattacctgagcacccagagcgccctgtccaaggaccctaacgagaagagagatcacatggtgctgctcgagttcgtgaccgccgccggcatcaccctgggcatggacgagctgtacaagagatcccgcgacatcagccacggctttcctcccgccgtggcggcccaagacgacgggaccctgcccatgagctgcgcgcaggagtccggcatggacaggcaccccgccgcctgcgccagcgccaggatcaacgtgtaa

SEQ ID NO: 763 - DNA, 855 bp, Artificial Sequence
  Modified Open Reading Frame
atggtgtccaagggcgaggagctgttcaccggcgtggtgcccatcctggtggagctggacggcgacgtgaacggccacaagtttagcgtgtccggcgagggcgaaggcgacgccacctacggcaagctgaccctgaagttcatctgcaccaccggcaaactgcccgtgccctggcccaccctcgtgaccaccctgacctacggagtccagtgcttcagcagataccccgaccacatgaagcagcacgacttcttcaagtccgccatgcccgagggctacgtccaggaaagaaccatcttctttaaggacgacggaaactataagaccagagccgaggtgaagttcgagggagacaccctggtgaaccgaatcgagctgaaaggcatcgacttcaaagaggacggcaacatcctgggccacaaactggagtacaactacaacagccacaacgtgtacatcatggccgacaaacagaagaacgggatcaaggtgaactttaagatcagacacaacatcgaagacggcagcgtgcagctcgccgaccactaccagcagaacacacccatcggcgacggacccgtgctgctgcccgacaaccattacctgagcacccagagcgccctgtccaaggaccctaacgagaagagagatcacatggtgctgctcgagttcgtgaccgccgccggcatcaccctgggcatggacgagctgtacaagagatcccgcgacatcagccacggctttcctcccgccgtggccgcccaagacgacgggaccctgcccatgagctgcgcccaggagtccggcatggacagacaccccgccgcctgtgccagcgccaggatcaacgtgtaa

SEQ ID NO: 764 - DNA, 855 bp, Artificial Sequence
  Modified Open Reading Frame
atggtgtccaagggcgaggagctctttaccggcgtggtgcctatcctggtggagctggacggcgacgtgaacggccacaagtttagcgtgtccggagagggcgaaggcgatgccacctatggcaaactgaccctgaagttcatctgcaccacgggcaaactgcccgtgccctggcccacgttggtgaccaccctcacctatggagtccagtgcttcagccgatacccggaccatatgaagcagcacgacttcttcaagtccgccatgccggaaggctacgtccaggagagaaccatcttctttaaggacgacggcaactataagaccagagccgaggtcaagttcgagggagacaccctcgtgaaccggatcgagctgaagggcatcgacttcaaggaggatggcaacatcttgggccacaagctggagtacaactacaacagccacaacgtgtatatcatggcggataagcagaagaacgggatcaaggtgaactttaagatcagacataatatcgaggacggcagcgtgcagctcgccgatcattaccagcagaacacgccaatcggcgacggccccgtgctgctgcccgataatcattacttgagcacgcagagcgccctgtccaaggaccctaacgagaagcgagatcacatggtcctgctggagttcgtgaccgccgcaggaatcaccctgggcatggacgagctgtataagagatcccgcgacatcagccacggctttccccccgccgtggcagcacaagacgacgggaccctgcccatgagctgcgcgcaggaatccggcatggatagacatccggccgcctgtgccagcgccaggatcaacgtgtaa

SEQ ID NO: 765 - DNA, 855 bp, Artificial Sequence
  Modified Open Reading Frame
atggtgtccaagggcgaggagctctttaccggcgtggtgcctatcctggtggagctggacggcgacgtgaacggccacaagtttagcgtgtccggagagggcgaaggcgatgccacctatggcaaactgaccctgaagttcatctgcaccacgggcaaactgcccgtgccctggcccacgttggtgaccaccctcacctatggagtccagtgcttcagccgatacccggaccatatgaagcagcacgacttcttcaagtccgccatgccggaaggctacgtccaggagagaaccatcttctttaaggacgacggcaactataagaccagagccgaggtcaagttcgagggagacaccctcgtgaaccggatcgagctgaagggcatcgacttcaaggaggatggcaacatcttgggccacaagctggagtacaactacaacagccacaacgtgtatatcatggcggataagcagaagaacgggatcaaggtgaactttaagatcagacataatatcgaggacggcagcgtgcagctcgccgatcattaccagcagaacacgccaatcggcgacggccccgtgctgctgcccgataatcattacttgagcacgcagagcgccctgtccaaggaccctaacgagaagcgagatcacatggtcctgctggagttcgtgaccgccgccggcatcaccctgggcatggacgagctgtataagagatcccgcgacatcagccacggctttccccccgccgtggcagcacaagacgacgggaccctgcccatgagctgcgcgcaggaatccggcatggatagacatccggccgcctgtgccagcgccaggatcaacgtgtaa

SEQ ID NO: 766 - DNA, 855 bp, Artificial Sequence
  Modified Open Reading Frame
atggtgtccaagggcgaggagctctttaccggcgtggtgcctatcctggtggagctggacggcgacgtgaacggacacaagtttagcgtgtccggagagggcgaaggcgatgccacctacggcaagctgaccctgaagttcatctgcaccacgggcaaactgcccgtgccctggcccacgttggtgaccaccctcacctatggagtccagtgcttcagccgatacccggaccatatgaagcagcacgacttcttcaagtccgccatgccggaaggctacgtccaggagagaaccatcttctttaaggacgacggcaactataagaccagagccgaggtcaagttcgagggagacaccctcgtgaaccggatcgagctgaagggcatcgacttcaaggaggatggcaacatcttgggccacaagctggagtacaactacaacagccacaacgtgtacatcatggccgataagcagaagaacgggatcaaggtgaactttaagatcagacataatatcgaggacggcagcgtgcagctcgccgatcattaccagcagaacacgccaatcggcgacggccccgtgctgctgcccgataatcattacctgagcacgcagagcgccctgtccaaggaccctaacgagaagagagatcacatggtgctgctcgagttcgtaaccgccgccggcatcaccctgggcatggacgagctgtataagagatcccgcgacatcagccacggctttccccccgccgtggcagcacaagacgacgggaccctgcccatgagctgcgcgcaggaatccggcatggatagacacccggccgcctgtgccagcgccaggatcaacgtgtaa

SEQ ID NO: 767 - DNA, 855 bp, Artificial Sequence
  Modified Open Reading Frame
atggtgtccaagggcgaggagctctttaccggcgtggtgcctatcctggtggagctggacggcgacgtgaacggacacaagtttagcgtgtccggagagggcgaaggcgacgccacctacggcaagctgaccctgaagttcatctgcaccacgggcaaactgcccgtgccctggcccaccctggtgaccaccctcacctatggagtccagtgcttcagccgatacccggaccacatgaagcagcacgacttcttcaagtccgccatgccggaaggctacgtccaggagagaaccatcttctttaaggacgacggaaactataagaccagagccgaggtcaagttcgagggagacaccctggtgaacaggatcgagctgaagggcatcgacttcaaggaggatggcaacatactgggccacaaactggagtacaactacaacagccacaacgtgtacatcatggccgataaacagaagaacgggatcaaggtgaactttaagatcagacacaatatcgaggacggcagcgtgcagctcgccgaccactaccagcagaacacaccaatcggcgacggccccgtgctgctgcccgataaccattacctgagcacgcagagcgccctgtccaaggaccctaacgagaagagagatcacatggtgctgctcgagttcgtaaccgccgccggcatcaccctgggcatggacgagctgtataagagatcccgcgacatcagccacggctttcctcccgccgtggcagcacaagacgacgggaccctgcccatgagctgcgcgcaggaatccggcatggatagacacccggccgcctgtgccagcgccaggatcaacgtgtaa

SEQ ID NO: 768 - DNA, 855 bp, Artificial Sequence
  Modified Open Reading Frame
atggtgtccaagggcgaggagctgtttaccggcgtggtgcctatcctggtggagctggacggcgacgtgaacggacacaagtttagcgtgtccggagagggcgaaggcgacgccacctacggcaagctgaccctgaagttcatctgcaccacgggcaaactgcccgtgccctggcccaccctggtgaccaccctcacctatggagtccagtgcttcagccgatacccggaccacatgaagcagcacgacttcttcaagtccgccatgccggaaggctacgtccaggagagaaccatcttctttaaggacgacggaaactataagaccagagccgaggtcaagttcgagggagacaccctggtgaacaggatcgagctgaagggcatcgacttcaaggaggatggcaacatactgggccacaaactggagtacaactacaacagccacaacgtgtacatcatggccgataaacagaagaacgggatcaaggtgaactttaagatcagacacaacatcgaagacggcagcgtgcagctcgccgaccactaccagcagaacacacccatcggcgacggacccgtgctgctgcccgacaaccattacctgagcacccagagcgccctgtccaaggaccctaacgagaagagagatcacatggtgctgctcgagttcgtgaccgccgccggcatcaccctgggcatggacgagctgtataagagatcccgcgacatcagccacggctttcctcccgccgtggcagcacaagacgacgggaccctgcccatgagctgcgcgcaggaatccggcatggatagacacccggccgcctgtgccagcgccaggatcaacgtgtaa

SEQ ID NO: 769 - DNA, 855 bp, Artificial Sequence
  Modified Open Reading Frame
atggtgtccaagggcgaggagctgttcaccggcgtggtgcctatcctggtggagctggacggcgacgtgaacggccacaagtttagcgtgtccggcgagggcgaaggcgacgccacctacggcaagctgaccctgaagttcatctgcaccacgggcaaactgcccgtgccctggcccaccctcgtgaccaccctgacctacggagtccagtgcttcagcagataccccgaccacatgaagcagcacgacttcttcaaatccgccatgcccgagggctacgtgcaggaaagaaccatcttctttaaggacgacggaaactataagaccagagccgaggtgaagttcgagggagacaccctggtgaacagaatcgagctgaagggcatcgacttcaaagaggatggcaacatactgggccacaaactggagtacaactacaacagccacaacgtgtacatcatggccgataaacagaagaacgggatcaaggtgaactttaagatcagacacaacatcgaagacggcagcgtgcagctcgccgaccactaccagcagaacacacccatcggcgacggacccgtgctgctgcccgacaaccattacctgagcacccagagcgccctgtccaaggaccctaacgagaagagagatcacatggtgctgctcgagttcgtgaccgccgccggcatcaccctgggcatggacgagctgtacaagagatcccgcgacatcagccacggctttcctcccgccgtggccgcccaagacgacgggaccctgcccatgagctgcgcccaggagtccggcatggacagacaccccgccgcctgtgccagcgccaggatcaacgtgtaa

SEQ ID NO: 770 - DNA, 855 bp, Artificial Sequence
  Modified Open Reading Frame
atggtgtccaagggcgaggagctgttcaccggcgtggtgcctatcctggtggagctggacggcgacgtgaacggccacaagtttagcgtgtccggcgagggcgaaggcgacgccacctacggcaagctgaccctgaagttcatctgcaccaccggcaaactgcccgtgccctggcccaccctcgtgaccaccctgacctacggagtccagtgcttcagcagataccccgaccacatgaagcagcacgacttcttcaaatccgccatgcccgagggctacgtgcaggaaagaaccatcttctttaaggacgacggaaactataagaccagagccgaggtgaagttcgagggagacaccctggtgaacagaatcgagctgaagggcatcgacttcaaagaggacggcaacatactgggccacaaactggagtacaactacaacagccacaacgtgtacatcatggccgacaaacagaagaacgggatcaaggtgaactttaagatcagacacaacatcgaagacggcagcgtgcagctcgccgaccactaccagcagaacacacccatcggcgacggacccgtgctgctgcccgacaaccattacctgagcacccagagcgccctgtccaaggaccctaacgagaagagagatcacatggtgctgctcgagttcgtgaccgccgccggcatcaccctgggcatggacgagctgtacaagagatcccgcgacatcagccacggctttcctcccgccgtggccgcccaagacgacgggaccctgcccatgagctgcgcccaggagtccggcatggacagacaccccgccgcctgtgccagcgccaggatcaacgtgtaa

SEQ ID NO: 771 - DNA, 855 bp, Artificial Sequence
  Modified Open Reading Frame
atggtgtcaaaaggagaggaactgtttactggcgttgtgccaatactggtcgagcttgacggtgacgtcaatggtcacaagtttagcgtcagcggtgagggcgagggcgatgccacctacggcaagctgacattgaagttcatatgtaccactggaaagttaccagttccgtggcccaccctagtaactaccctcacctatggagtgcaatgcttttcgaggtaccccgatcacatgaagcagcacgacttcttcaagtccgcgatgcctgagggttacgtccaagagagaacaatattctttaaggatgatggcaattacaaaacgcgtgccgaggtgaagttcgagggtgatacgctcgtgaatcggattgaactcaagggcattgacttcaaagaggacggtaatatactcggccacaaactggaatacaattataactcgcacaacgtctatatcatggctgataagcagaagaatggcatcaaggtgaactttaagatccggcataatatcgaggatggaagcgtgcaacttgcggaccactatcaacagaatacgcctatcggggacggaccagtcctcctccctgataatcattatcttagtacgcaaagcgcgttgtccaaagatcccaacgagaagcgggatcatatggttctccttgagtttgtcactgctgctggtatcacccttggtatggacgagttatataaacggtccagggacatatcgcatggatttccgcctgcggtggcggcacaggacgacggcaccttaccgatgtcgtgtgctcaggaatcagggatggaccgtcatcctgcggcctgtgccagcgctaggataaacgtgtga

SEQ ID NO: 772 - DNA, 855 bp, Artificial Sequence
  Modified Open Reading Frame
atggtgtcaaagggcgaggagctatttaccggcgtggtgccgattctggtggagctggacggcgacgtgaacggacacaagttctcggtgagtggcgaaggtgaaggcgacgccacgtacgggaagcttaccctgaaattcatctgtaccacgggtaagcttcctgtaccgtggccgaccttggtgaccactctgacttacggcgtgcagtgcttcagtcggtaccccgaccacatgaagcagcacgacttcttcaagtcggctatgcccgaagggtatgtccaagagcgtaccatcttctttaaagacgatggcaattacaagacccgggccgaggtgaagttcgagggcgacaccttggtgaaccggatcgagctgaagggcatcgactttaaggaagatggtaacattcttggacataagttggagtacaactacaatagccataatgtgtacattatggccgataagcagaagaatggcatcaaggtcaacttcaagattcgccacaacatcgaggacgggtccgttcagctcgccgaccactaccagcagaatacaccaatcggcgacggccccgtgctgttgccggacaaccattatcttagcacgcagtcagcgctgtcgaaggacccgaatgagaagcgcgaccacatggtgcttctagagttcgtcactgccgcagggatcaccctcggcatggacgagctctacaagcgtagtcgcgacatctcacacgggttcccgccagcggtggctgcgcaagatgatgggacgttgccgatgagctgcgcgcaggagtccggcatggatagacatcctgccgcctgcgccagcgctcggatcaacgtctaa

SEQ ID NO: 773 - DNA, 855 bp, Artificial Sequence
  Modified Open Reading Frame
atggtttctaaaggtgaggagctgttcaccggtgtggtgcctattctggtggagctggacggcgacgtgaacggacacaagttctcggtgagtggcgaaggtgaaggcgacgccacgtacgggaagcttaccctgaaattcatctgtaccacgggtaagcttcctgtaccgtggccgaccttggtgaccactctgacttacggcgtgcagtgcttcagtcggtaccccgaccacatgaagcagcacgacttcttcaagtcggctatgcccgaagggtatgtccaagagcgtaccatcttctttaaagacgatggcaattacaagacccgggccgaggtgaagttcgagggcgacaccttggtgaaccggatcgagctgaagggcatcgactttaaggaagatggtaacattcttggacataagttggagtacaactacaatagccataatgtgtacattatggccgataagcagaagaatggcatcaaggtcaacttcaagattcgccacaacatcgaggacgggtccgttcagctcgccgaccactaccagcagaatacacccatcggtgacggccctgtgttgttgcccgacaaccattatcttagcacgcagtcagcgctgtcgaaggacccgaatgagaagcgcgaccacatggtgcttctagagttcgtcactgccgcagggatcaccctcggcatggacgagctctacaagcgtagtcgcgacatctcacacgggttcccgccagcggtggctgcgcaagatgatgggacgttgccgatgagctgcgcgcaggagtccggcatggatagacatcctgccgcctgcgccagcgctcggatcaacgtctaa

SEQ ID NO: 774 - DNA, 855 bp, Artificial Sequence
  Modified Open Reading Frame
atggtgtctaagggtgaagagctcttcaccggagtggtgcctattctggtggagctggacggcgacgtgaacggacacaagttctcggtgagtggcgaaggtgaaggcgacgccacgtacgggaagcttaccctgaaattcatctgtaccacgggtaagcttcctgtaccgtggccgaccttggtgaccactctgacttacggcgtgcagtgcttcagtcggtaccccgaccacatgaagcagcacgacttcttcaagtcggctatgcccgaagggtatgtccaagagcgtaccatcttctttaaagacgatggcaattacaagacccgggccgaggtgaagttcgagggcgacaccttggtgaaccggatcgagctgaagggcatcgactttaaggaagatggtaacattcttggacataagttggagtacaactacaatagccataatgtgtacattatggccgataagcagaagaatggcatcaaggtcaacttcaagattcgccacaacatcgaggacgggtccgttcagctcgccgaccactaccagcagaatacgcccattggcgacggccccgtgctgttgcctgacaaccattatcttagcacgcagtcagcgctgtcgaaggacccgaatgagaagcgcgaccacatggtgcttctagagttcgtcactgccgcagggatcaccctcggcatggacgagctctacaagcgtagtcgcgacatctcacacgggttcccgccagcggtggctgcgcaagatgatggtacgttgccgatgagctgcgcgcaggagtccggcatggatagacatcctgccgcctgcgccagcgctcggatcaacgtgtaa

SEQ ID NO: 775 - DNA, 855 bp, Artificial Sequence
  Modified Open Reading Frame
atggtatcaaaaggagaagagctgtttaccggggttgtgcccatcttggtggagctggacggtgatgtcaatggccataagttcagcgtcagcggggagggagaaggcgacgcgacgtacgggaagctgacgttgaaattcatctgcacgacgggcaaactgcccgtcccgtggccgactctcgttaccaccctcacgtacggcgtgcagtgcttctcccgctaccctgatcacatgaagcagcatgacttcttcaaaagtgctatgcccgaaggttatgtgcaggagaggaccatcttctttaaggacgatggcaactacaagacccgggcagaggtcaaatttgagggagacacgctcgtgaaccggattgagcttaagggcattgacttcaaagaggacggcaacatccttgggcacaaactcgagtacaactacaactcgcataacgtgtacattatggcggacaagcagaagaacggtatcaaagtaaactttaaaatacgacacaacattgaggacgggagcgtacagctggctgaccactatcagcagaatacacctatcggggacggaccagtcctcctccccgataatcattacctgagtactcagtcagctctctccaaggaccccaatgagaagagagatcacatggtgctgttggagttcgtgacggcggcggggatcacgctggggatggacgagctctacaaaaggtcgcgcgacatctctcacgggttcccccccgccgtcgcagcccaagacgacggcaccctgccgatgtcgtgtgctcaggagagtggtatggaccgtcatcctgctgcgtgcgccagtgcacgtataaatgtgtga

SEQ ID NO: 776 - DNA, 855 bp, Artificial Sequence
  Modified Open Reading Frame
atggtgtccaagggcgaagagctttttacaggggtggttcctatactggtggagttggacggcgacgtgaacggccacaagttttctgtgagtggtgagggcgaaggcgacgccacctatggcaagctgaccctgaagttcatatgcaccacgggcaagttacccgtgccgtggcccaccctggtcaccaccctgacctacggagtccagtgcttctctcgatatccggaccatatgaagcagcacgacttcttcaagtcagccatgcccgagggctatgtccaggagcgtaccatcttctttaaagacgacggtaactacaaaacgagggccgaggtgaagttcgaaggagacaccctggtcaatcgtattgagttgaagggcatcgactttaaagaagatggtaacatccttggacataagctggagtacaactataacagccataacgtttacatcatggccgacaaacagaagaatgggatcaaggtaaactttaaaatccgtcataacatcgaagacggcagcgtgcagctcgccgaccactaccagcagaacacacccataggagacggtcccgttctgctgcccgacaaccactacctaagcacgcaatcagccctgtcaaaggaccccaacgagaagagggaccatatggtgctgcttgagttcgtcaccgccgccgggatcaccctgggcatggatgagctttataagcgcagccgtgacatcagccacggcttcccgccggcggtggccgcgcaggacgacgggacgctgcccatgagctgcgcccaagagagcggcatggacagacaccccgcggcctgtgcctctgcgcgtataaacgtgtag

SEQ ID NO: 777 - DNA, 855 bp, Artificial Sequence
  Modified Open Reading Frame
atggtgtccaagggcgaagagctttttacaggggtggttcctatactggtggagttggacggcgacgtgaacggccacaagttttctgtgagtggtgagggcgaaggcgacgccacctatggcaagctgaccctgaagttcatatgcaccacgggcaagttacccgtgccgtggcccaccctggtcaccaccctgacctacggagtccagtgcttctctcgatatccggaccatatgaagcagcacgacttcttcaagtcagccatgcccgagggctatgtccaggagcgtaccatcttctttaaagacgacggtaactacaaaacgagggccgaggtgaagttcgaaggagacaccctggtcaatcgtattgagttgaagggcatcgactttaaagaagatggtaacatccttggacataagctggagtacaactataacagccataacgtttacatcatggccgacaaacagaagaatgggatcaaggtaaactttaaaatccgtcataacattgaagacggcagcgtgcagctcgccgaccactaccagcagaacacacccataggagacggtcccgttctgctgcccgacaaccactacctaagcacgcaatcagccctgtcaaaggaccccaacgagaagagggaccatatggtgctgcttgagttcgtcaccgccgccgggatcaccctgggcatggatgagctttataagcgcagccgtgacatcagccacggcttcccgccggcggtggccgcgcaggacgacgggacgctgcccatgagctgcgcccaagagagcgggatggacagacaccccgcggcctgtgcctctgcgcgtataaacgtgtag

SEQ ID NO: 778 - DNA, 855 bp, Artificial Sequence
  Modified Open Reading Frame
atggtgtccaagggcgaagagctttttacaggggtggttcctatactggtggagttggacggcgacgtgaacggccacaagttttctgtgagtggtgagggcgaaggcgacgccacatatggcaagctgaccctgaagttcatatgcaccacgggcaagttacccgtgccgtggcccaccctggtcaccaccctgacctacggagtccagtgcttctctcgatatccggaccatatgaagcagcacgacttcttcaagtcagccatgcccgagggctatgtccaggagcgtaccatcttctttaaagacgatggtaactacaaaacgagggccgaggtgaagttcgaaggagacaccctggtcaatcgtattgagttgaagggcatcgactttaaagaagatggtaacatccttggacataagctggagtacaactataacagccataacgtttacatcatggccgacaaacagaagaatggcatcaaggtaaactttaaaatccgtcataacattgaagacggcagcgtgcagctcgccgaccactaccagcagaacacacccataggagacggtcccgttctgctgcccgacaaccactacctaagcacgcaatcagccctgtcaaaggaccccaacgagaagagggaccatatggtgctgcttgagttcgtcaccgccgccgggatcaccctgggcatggatgagctttataagcgcagccgtgacatcagccacggcttcccgccggcggtggccgcgcaggacgacgggacgctgcccatgagctgcgcccaagagagcgggatggacagacaccccgcggcctgtgcctctgcgcgtataaacgtgtag

SEQ ID NO: 779 - DNA, 855 bp, Artificial Sequence
  Modified Open Reading Frame
atggtgtccaagggcgaagagctttttacaggggtggttcctatactggtggagttggacggcgacgtgaacggccacaagttttctgtgagtggtgagggcgaaggcgacgccacatatggcaagctgaccctgaagttcatatgcacgacgggcaagttaccggtgccgtggcccaccctggtcaccaccctgacctacggagtccagtgcttctctcggtatccggaccatatgaagcagcacgacttcttcaagtcagccatgcccgagggctatgtccaggagcgtaccatcttctttaaagacgatggtaactacaaaacgagggccgaggtgaagttcgaaggagacaccctggtcaatcgtattgagttgaagggcatcgactttaaagaagatggtaacatccttggacataagctggagtacaactataacagccataacgtttacatcatggccgacaaacagaagaatggcatcaaggtaaactttaaaatccgtcataacattgaagacggcagcgtgcagttggcggaccactaccagcagaacacacccataggagacggtcccgttctgctgcccgacaaccactacctaagcacgcaatcagccctgtcaaaggaccccaacgagaagagggaccatatggtgctgcttgagttcgtcaccgccgccgggatcaccctgggcatggatgagctttataagcgcagccgtgacatcagccacggattcccgccggcggtggccgcgcaggacgacgggacgctgcccatgagctgcgcccaagagagcgggatggacagacaccccgcggcctgtgcctctgcgcgtataaacgtgtag

SEQ ID NO: 780 - DNA, 855 bp, Artificial Sequence
  Modified Open Reading Frame
atggtgtccaagggcgaagagctttttacaggggtggttcctatactggtggagttggacggcgacgtgaacggccacaagttttctgtgagtggtgagggcgaaggcgacgccacatatggcaagctgaccctgaagttcatatgcacgacgggcaagttaccggtgccgtggcccaccctggtcaccaccctgacctacggagtccagtgcttctctcggtatccggatcatatgaaacagcatgacttcttcaagagtgctatgcccgaaggctatgtccaggagcgtaccatcttctttaaagacgatggtaactacaaaacgagggccgaggtgaagttcgaaggagacaccctggtcaatcgtattgagttgaagggcatcgactttaaagaagatggtaacatccttggacataagcttgagtacaactataacagtcataatgtttacataatggccgataaacagaagaatggcatcaaggtaaactttaaaatccgtcataacattgaagacggcagcgtgcagttggcggaccactaccagcagaacacacccataggagacggtcccgttctgctgcccgacaaccactacctaagcacgcaatcagccctgtcaaaggaccccaacgagaagagggaccatatggtgctgcttgagttcgtcaccgccgccgggatcaccctgggcatggatgagctttataagcgcagccgtgacatcagccacggattcccgccggcggtggccgcgcaggacgacgggacgctgcccatgagctgcgcccaagagagcgggatggacagacatcccgcggcctgtgcctctgcgcgtataaacgtgtag

SEQ ID NO: 781 - DNA, 855 bp, Artificial Sequence
  Modified Open Reading Frame
atggtgtccaagggcgaagagctttttaccggggtggttcctatactggtggaattggacggcgacgtgaacggccacaagttttctgtgagtggtgagggcgaaggcgacgccacatatggcaagctgaccctgaagttcatatgcacgacgggcaagttaccggtgccgtggcccaccctggtcaccaccctgacctacggagtccagtgcttctctcggtatccggatcatatgaaacagcatgacttcttcaagagtgctatgccagaaggttatgtccaggagcgtaccatcttctttaaagacgatggtaactacaaaacgagggccgaggtgaagttcgaaggagacaccctggtcaatcgtattgagttgaagggcatcgactttaaagaagatggtaacatccttggacataagcttgagtacaactataacagtcataatgtttacataatggccgataaacagaagaatggcatcaaggtaaactttaaaatccgtcataacattgaagacggcagcgtgcagttggcggaccactaccagcagaacacacccataggagacggtcccgttctgctgcccgacaaccactacctaagcacgcaatcagccctgtcaaaggaccccaacgagaagagggaccatatggtgctgcttgagttcgtcaccgccgccgggatcaccctgggcatggatgagctttataagcgcagccgtgacatcagccacggattcccgccggcggtggccgcgcaggacgacgggacgctgcccatgagctgcgcccaagagagcgggatggacagacatcccgcggcctgtgcctctgcgcgtataaacgtgtag

SEQ ID NO: 782 - DNA, 855 bp, Artificial Sequence
  Modified Open Reading Frame
atggtaagcaaaggagaagaattgttcacgggtgttgtaccgatcctcgtggagctggatggtgacgtgaacggccacaagttcagcgtttctggtgaaggggaaggggacgccacgtacgggaaactgacgctgaagttcatttgcaccaccggaaaactgcctgtcccgtggccgactctcgtcaccaccctgacctacggggttcagtgcttcagcagataccctgatcatatgaaacagcatgatttcttcaaaagtgccatgcccgaggggtacgtgcaggagagaacaatcttttttaaggacgacgggaactataaaactagggcagaggtcaagtttgagggtgataccctcgtcaatagaattgagctcaagggcatcgacttcaaggaggatggcaacattttgggacacaagctggagtataattacaactctcataacgtttatatcatggcggacaaacagaagaacggtattaaggttaatttcaagatcaggcacaacatcgaagacgggagtgttcagctggctgaccactaccagcagaacacccctatcggcgatggcccggtcttgctacctgacaaccattacctttctactcagagtgcgctgtcaaaggatccaaacgagaagagagatcacatggtgctcctggagttcgtaaccgccgcaggaataaccctcgggatggatgagctgtacaagaggtcgagggacatatcgcacgggtttccacccgcagtagcagcccaggacgatggaaccctccccatgtcgtgcgctcaggagtccggaatggatcgtcatccggcggcttgcgcaagcgccaggatcaacgtgtga

SEQ ID NO: 783 - DNA, 855 bp, Artificial Sequence
  Modified Open Reading Frame
atggtgtcaaaaggagaggaactgtttactggcgttgtgccaatactggtcgagcttgacggtgacgtcaatggtcacaagtttagcgtcagcggtgagggcgagggcgatgccacctacggcaagctgacattgaagttcatatgtaccactggaaagttaccagttccgtggcccaccctagtaactaccctcacctatggagtgcaatgcttttcgaggtaccccgatcacatgaagcagcacgacttcttcaaatccgccatgcctgagggttacgtccaagagagaacaatattctttaaggatgatggcaattacaaaacgcgtgccgaggtgaagttcgagggtgatacgctcgtgaatcggattgaactcaagggcattgacttcaaagaggacggtaatatactcggccacaaactggaatacaattataactcgcacaacgtctatatcatggctgataagcagaagaatggcatcaaggtgaactttaagatccggcataatatcgaggatggaagcgtgcaacttgcggaccactatcaacagaatacgcctatcggggacggaccagtcctcctccctgataatcattatcttagtacgcaaagcgcgttgtccaaagatcccaacgagaagcgggatcatatggttctccttgagtttgtcactgctgctggtatcacccttggtatggacgagttatataaacggtccagggacatatcgcatggatttccgcctgcggtggcggcacaggacgacggcaccttaccgatgtcgtgtgctcaggaatcagggatggaccgtcatcctgcggcctgtgccagcgctaggataaacgtgtga

SEQ ID NO: 784 - DNA, 855 bp, Artificial Sequence
  Modified Open Reading Frame
atggtaagcaagggagaggagttattcacgggtgtcgttccaatcttggtggagctggacggcgacgtcaacggacacaagtttagtgtgtccggagagggcgagggtgacgcaacgtatggtaagctgaccttgaagttcatctgcactaccggcaaactgcctgtgccgtggcccacgctcgtgacgacgcttacctacggagtacagtgcttcagtaggtaccccgatcacatgaagcagcacgacttctttaagagcgcgatgcccgagggctacgtccaggagcgtaccatcttctttaaggatgatggtaactataagacgcgggccgaggtgaagttcgagggcgacaccttggtcaaccggatcgagctcaagggcatcgattttaaagaggacgggaacatcctgggccacaagttggagtacaactacaacagccataatgtatacattatggctgacaagcagaagaacggtatcaaggtgaacttcaagatccgtcataacattgaggatggttcggtgcagctcgccgatcactaccagcagaacacgcccatcggcgatgggcctgttctgctgccggacaaccattacttgtccacccagagcgccctctccaaggaccctaacgaaaaacgggaccacatggtcctgcttgagttcgtgaccgccgccggcatcaccctgggcatggacgagctatataagaggtcccgtgatatcagccacggctttcctccagccgtggctgcacaagatgacgggacactgcctatgagctgtgcccaggagtcaggaatggatcgacacccggcagcgtgtgcaagcgctagaataaatgtttga

SEQ ID NO: 785 - DNA, 855 bp, Artificial Sequence
  Modified Open Reading Frame
atggtatcgaaaggagaggaattgttcaccggcgtggtgcctattctggtggagctggacggcgacgtgaacggccacaagttctcggtgtctggcgagggcgagggcgacgccacttatggcaagctcaccctgaagttcatctgcaccacggggaagctgcccgtgccctggcccaccctggtgaccaccctgacctacggcgtgcagtgcttcagtcggtaccccgaccacatgaagcagcacgacttcttcaagtcggccatgcccgaggggtatgtgcaggagcggaccatcttctttaaagacgatggcaattataaaacccgtgccgaggtgaagttcgagggcgacaccttggtcaacaggattgaattaaaaggcatcgactttaaagaagatggcaacatcctgggccacaagttagagtacaactacaactctcacaatgtgtatatcatggccgacaagcagaagaacggcatcaaggtgaattttaagatcagacacaacatcgaggacggctctgttcagctcgccgaccactaccagcagaatacgcctattggcgacggccccgtgctgctgccggacaaccactacttgtccacgcagtctgccctgtctaaggaccccaacgagaagcgggaccacatggtcctgctggagttcgtgaccgccgccggcatcacgctgggcatggacgagctctacaagaggtcccgtgatatctcccacggctttccaccagccgtggccgcgcaggatgacgggacccttccgatgagctgcgcccaggagtccggcatggacagacaccccgccgcctgtgccagcgctaggatcaacgtgtaa

SEQ ID NO: 786 - DNA, 855 bp, Artificial Sequence
  Modified Open Reading Frame
atggtatcgaaaggagaggaattattcaccggcgtggtgcctattctggtggagctggacggcgacgtgaacggccacaagttctcggtgtctggcgagggcgagggcgacgccacttatggcaagctcaccctgaagttcatctgcaccacggggaagctgcccgtgccctggcccaccctggtgaccaccctgacctacggcgtgcagtgcttcagtcggtaccccgaccacatgaagcagcacgacttcttcaagtcggccatgcccgaggggtatgtgcaggagcggaccatcttctttaaagacgatggcaattataaaacccgtgccgaggtgaagttcgagggcgacaccttggtcaacaggattgaattaaaaggcatcgactttaaagaagatggcaacatcctgggccacaagttagagtacaactacaactctcacaatgtgtatatcatggccgacaagcagaagaacggcatcaaggtgaattttaagatcagacacaacatcgaggacggctctgttcagctcgccgaccactaccagcagaatacgcctattggcgacggccccgtgctgctgccggacaaccactacttgtccacgcagtctgccctgtctaaggaccccaacgagaagcgggaccacatggtgctgctggagttcgtgaccgccgccggcatcacgctgggcatggacgagctctacaagagatcccgcgacattagccacggctttcctcccgccgtggccgcccaagacgacgggaccctgcccatgagctgcgcccaggagtccggcatggacagacaccccgccgcctgtgccagcgctaggatcaacgtgtaa

SEQ ID NO: 787 - DNA, 855 bp, Artificial Sequence
  Modified Open Reading Frame
atggtatcgaagggagaggaattattcaccggcgtggtgcctattctggtggagctggacggcgacgtgaacggccacaagttctcggtgtctggcgagggcgagggcgacgccacttatggcaagctcaccctgaagttcatctgcaccacggggaagctgcccgtgccctggcccaccctggtgaccaccctgacctacggcgtgcagtgcttcagtcggtaccccgaccacatgaagcagcacgacttcttcaagtcggccatgcccgaggggtatgtgcaggagcggaccatcttctttaaagacgatggcaattataaaacccgtgccgaggtgaagttcgagggcgacaccttggtcaacaggattgaattaaaaggcatcgactttaaagaagatggcaacatcctgggccacaagttagagtacaactacaactctcacaatgtgtatatcatggccgacaagcagaagaacggcatcaaggtgaattttaagatcagacacaacatcgaggacggctctgttcagctcgccgaccactaccagcagaatacgcctattggcgacggccccgtgctgctgccggacaaccactacttgtccacgcagtctgccctgtctaaggaccccaacgagaagcgggaccacatggtgctgctggagttcgtgaccgccgccggcatcacgctgggcatggacgagctgtacaagagatcccgcgacattagccacggctttcctcccgccgtggccgcccaagacgacgggaccctgcccatgagctgcgcccaggagtccggcatggacagacaccccgccgcctgtgccagcgccaggatcaacgtgtaa

SEQ ID NO: 788 - DNA, 855 bp, Artificial Sequence
  Modified Open Reading Frame
atggtatcgaagggagaggaattattcaccggcgtggtgcctattctggtggagctggacggcgacgtgaacggccacaagttctcggtgtctggcgagggcgagggcgacgccacttatggcaagctcaccctgaagttcatctgcaccacggggaagctgcccgtgccctggcccaccctggtgaccaccctgacctacggcgtgcagtgcttcagtcggtaccccgaccacatgaagcagcacgacttcttcaagtcggccatgcccgaggggtatgtgcaggagcggaccatcttctttaaagacgatggcaattataaaacccgtgccgaggtgaagttcgagggcgacaccttggtcaacaggattgaattaaaaggcatcgactttaaagaagatggcaacatcctgggccacaagttagagtacaactacaactctcacaatgtgtatatcatggccgacaagcagaagaacggcatcaaggtgaattttaagatcagacacaacatcgaggacggctctgttcagctcgccgaccactaccagcagaatacgcccatcggcgacggccccgtgctgctgcccgacaaccactacctgtctacccagtctgccctgtctaaggaccccaacgagaagcgggaccacatggtgctgctggagttcgtgaccgccgccggcatcacgctgggcatggacgagctgtacaagagatcccgcgacattagccacggctttcctcccgccgtggccgcccaagacgacgggaccctgcccatgagctgcgcccaggagtccggcatggacagacaccccgccgcctgtgccagcgccaggatcaacgtgtaa

SEQ ID NO: 789 - DNA, 855 bp, Artificial Sequence
  Modified Open Reading Frame
atggtatcgaagggagaggaattattcaccggcgtggtgccaatactggtggagctggacggcgacgtgaacggccacaagttctcggtgtctggcgagggcgagggcgacgccacttatggcaagctcaccctgaagttcatctgcaccacggggaagctgcccgtgccctggcccaccctggtgaccaccctgacctacggcgtgcagtgcttcagtcggtaccccgaccacatgaagcagcacgacttcttcaagtcggccatgcccgaggggtatgtgcaggagcggaccatcttctttaaagacgatggcaattataaaacccgtgccgaggtgaagttcgagggcgacaccttggtcaacaggattgaattaaaaggcatcgactttaaagaagatggcaacatcctgggccacaagttagagtacaactacaactctcacaatgtgtatatcatggccgacaagcagaagaacggcatcaaggtgaattttaagatcagacacaacatcgaggacggctctgttcagctcgccgaccactaccagcagaatacgcccatcggcgacggccccgtgctgctgcccgacaaccactacctgtctacccagtctgccctgtctaaggaccccaacgagaagcgggaccacatggtgctgctggagttcgtgaccgccgccggcatcacgctgggcatggacgagctgtacaagagatcccgcgacatcagccacggctttcctcccgccgtggccgcccaagacgacgggaccctgcccatgagctgcgcccaggagtccggcatggacagacaccccgccgcctgtgccagcgccaggatcaacgtgtaa

SEQ ID NO: 790 - DNA, 855 bp, Artificial Sequence
  Modified Open Reading Frame
atggtatctaaaggagaggagctgttcaccggtgtggtgccaatactggtggagctggacggcgacgtgaacggccacaagttctcggtgtctggcgagggcgagggcgacgccacttatggcaagctcaccctgaagttcatctgcaccacggggaagctgcccgtgccctggcccaccctggtgaccaccctgacctacggcgtgcagtgcttcagtcggtaccccgaccacatgaagcagcacgacttcttcaagtcggccatgcccgaggggtatgtgcaggagcggaccatcttctttaaagacgatggcaattataaaacccgtgccgaggtgaagttcgagggcgacaccttggtcaacaggattgaattaaaaggcatcgactttaaagaagatggcaacatcctgggccacaagttagagtacaactacaactctcacaatgtgtatatcatggccgacaagcagaagaacggcatcaaggtgaattttaagatcagacacaacatcgaggacggctctgttcagctcgccgaccactaccagcagaatacgcccatcggtgacggccccgtgcttttgcccgacaaccactacctgtctacccagtctgccctgtctaaggaccccaacgagaagcgggaccacatggtgctgctggagttcgtgaccgccgccggcatcacgctgggcatggacgagctgtacaagagatcccgcgacatcagccacggctttcctcccgccgtggccgcccaagacgacgggaccctgcccatgagctgcgcccaggagtccggcatggacagacaccccgccgcctgtgccagcgccaggatcaacgtgtaa

SEQ ID NO: 791 - DNA, 855 bp, Artificial Sequence
  Modified Open Reading Frame
atggtatcgaagggtgaggaattattcaccggtgtggtgccaattctggtggagctggacggcgacgtgaacggacacaagttctcggtgtctggtgagggcgagggcgacgccacgtacggcaagcttaccctgaagttcatctgcactacggggaagctgccggtgccctggcccaccctggtgaccacactgacctacggcgtgcagtgcttcagtcggtaccccgaccacatgaagcagcacgacttcttcaagtcggccatgcccgaggggtatgtccaggagcggaccatcttctttaaagacgatggcaattacaagacccgcgccgaggtgaagttcgagggcgacaccttggtgaaccggatcgagctaaaaggcatcgactttaaagaagatggcaacatcctgggccacaagttggagtataattataattcccacaatgtgtatatcatggccgacaagcagaagaatggcatcaaggtaaactttaagatcagacacaacatcgaggacgggtccgttcagctcgccgaccactaccagcagaatacgcccatcggtgacggcccggtgctgctgccggataaccactacttgtccacccagtctgcattgtccaaggaccctaacgagaagcgggaccatatggtcctgcttgaattcgttacggccgcgggcatcacactgggaatggacgagttgtataagaggtcacgcgatatttcgcatggctttccgccagcggtggcagcacaggatgatgggacacttcccatgtcctgtgctcaggagtccggcatggatcggcacccggccgcctgtgcgtcggcacggattaatgtataa

SEQ ID NO: 792 - DNA, 855 bp, Artificial Sequence
  Modified Open Reading Frame
atggtatcgaagggagaggaattattcaccggtgtggtgccaattctggtggagctggacggcgacgtgaacggacacaagttctcggtgtctggtgagggcgagggcgacgccacgtacggcaagcttaccctgaagttcatctgcactacggggaagctgccggtgccctggcccaccctggtgaccacactgacctacggcgtgcagtgcttcagtcggtaccccgaccacatgaagcagcacgacttcttcaagtcggccatgcccgaggggtatgtccaggagcggaccatcttctttaaagacgatggcaattacaagacccgcgccgaggtgaagttcgagggcgacaccttggtgaaccggatcgagctaaaaggcatcgactttaaagaagatggcaacatcctgggccacaagttggagtataattataattcccacaatgtgtatatcatggccgacaagcagaagaatggcatcaaggtaaactttaagatcagacacaacatcgaggacgggtccgttcagctcgccgaccactaccagcagaatacgcccatcggtgacggcccggtgctgctgccggataaccactacttgtccacccagtctgcattgtccaaggaccctaacgagaagcgggaccatatggtcctgcttgaattcgttacggccgcgggcatcacactgggaatggacgagttgtataagaggtcacgcgatatttcgcatggctttccgccagcggtggcagcacaggatgatgggacacttcccatgtcctgtgctcaggagtccggcatggatcggcacccggccgcctgtgcgtcggcacggattaatgtataa

SEQ ID NO: 793 - DNA, 855 bp, Artificial Sequence
  Modified Open Reading Frame
atggtatcgaagggagaggaattgttcaccggtgtggtgccaattctggtggagctggacggcgacgtgaacggacacaagttctcggtgtctggtgagggcgagggcgacgccacgtacggcaagcttaccctgaagttcatctgcactacggggaagctgccggtgccctggcccaccctggtgaccacactgacctacggcgtgcagtgcttcagtcggtaccccgaccacatgaagcagcacgacttcttcaagtcggccatgcccgaggggtatgtccaggagcggaccatcttctttaaagacgatggcaattacaagacccgcgccgaggtgaagttcgagggcgacaccttggtgaaccggatcgagctaaaaggcatcgactttaaagaagatggcaacatcctgggccacaagttggagtataattataattcccacaatgtgtatatcatggccgacaagcagaagaatggcatcaaggtaaactttaagatcagacacaacatcgaggacgggtccgttcagctcgccgaccactaccagcagaatacgcccatcggtgacggcccggtgctgttgccggataaccactacttgtccacccagtctgcattgtccaaggaccctaacgagaagcgggaccatatggtcctgcttgaattcgttacggccgcgggcatcacactgggaatggacgagttgtataagaggtcacgcgatatttcgcatggctttccgccagcggtggcagcacaggatgatgggacacttcccatgtcctgtgctcaggagtccggcatggacaggcacccggccgcctgtgcgtcggcacggattaatgtatag

SEQ ID NO: 794 - DNA, 855 bp, Artificial Sequence
  Modified Open Reading Frame
atggtatcgaagggagaggaattgttcaccggtgtggtgccaattctggtggagctggacggcgacgtgaacggacacaagttctcggtgtctggagagggcgagggcgacgccacgtacggcaagcttaccctgaagttcatctgcactacggggaagctgccggtgccctggcccaccctggtgaccacactgacctacggcgtgcagtgcttcagtcggtaccccgaccacatgaagcagcacgacttcttcaagtcggccatgcccgaggggtatgtccaggagcggaccatcttctttaaagacgatggcaattacaagacccgcgccgaggtgaagttcgagggcgacaccttggtgaaccggatcgagctaaaaggcatcgactttaaagaagatggcaacatcctgggccacaagttggagtataattataattcccacaatgtgtatatcatggccgacaagcagaagaatggcatcaaggtgaattttaagatcagacacaacatcgaggacgggtccgttcagctcgccgaccactaccagcagaatacgcccatcggtgacggcccggtgctgttgccggataaccactacttgtccacccagtctgcattgtccaaggaccctaacgaaaagcgggaccacatggtcctgcttgagttcgttacggccgcgggcatcacactgggcatggacgagttgtacaagaggtcacgcgacatctcgcatggctttccgccagcggtggcagcacaggatgatgggacacttcccatgtcctgtgctcaggagtccggcatggacaggcacccggccgcctgtgcgtcggcacggattaatgtatag

SEQ ID NO: 795 - DNA, 855 bp, Artificial Sequence
  Modified Open Reading Frame
atggtatcgaagggagaggaattgttcaccggtgtggtgccaattctggtggagctggacggcgacgtgaacggacacaagttctcggtgtctggagagggcgagggcgacgccacttatggcaagcttaccctgaagttcatctgcactacggggaagctgcccgtgccctggcccaccctggtgaccacactgacctacggcgtgcagtgcttcagtcggtaccccgaccacatgaagcagcacgacttcttcaagtcggccatgcccgaggggtatgtccaggagcggaccatcttctttaaagacgatggcaattacaaaacccgcgccgaggtgaagttcgagggcgacaccttggtgaaccggattgagctaaaaggcatcgactttaaagaagatggcaacatcctgggccacaagttggagtacaactacaactcccacaatgtgtatatcatggccgacaagcagaagaacggcatcaaggtgaattttaagatcagacacaacatcgaggacgggtccgttcagctcgccgaccactaccagcagaatacgcccatcggtgacggcccggtgctgttgccggataaccactacttgtccacccagtctgcattgtccaaggaccctaacgaaaagcgggaccacatggtcctgcttgagttcgttacggccgcgggcatcacactgggcatggacgagttgtacaagaggtcacgcgacatctcgcatggctttccgccagcggtggcagcacaggatgatgggacacttcccatgtcctgtgctcaggagtccggcatggacaggcacccggccgcctgtgcgtcggcacggattaatgtatag

SEQ ID NO: 796 - DNA, 855 bp, Artificial Sequence
  Modified Open Reading Frame
atggtatcgaagggagaggaattgttcaccggtgtggtgccaattctggtggagctggacggcgacgtgaacggacacaagttctcggtgtctggagagggcgagggcgacgccacttatggcaagcttaccctgaagttcatctgcactacggggaagctgcccgtgccctggcccaccctggtgaccacactgacctacggcgtgcagtgcttcagtcggtaccccgaccacatgaagcagcacgacttcttcaagtcggccatgcccgaggggtatgtgcaggagcggaccatcttctttaaagacgatggcaattacaaaacccgcgccgaggtgaagttcgagggcgacaccttggtgaaccggattgagctaaaaggcatcgactttaaagaagatggcaacatcctgggccacaagttggagtacaactacaactcccacaatgtgtatatcatggccgacaagcagaagaacggcatcaaggtgaattttaagatcagacacaacatcgaggacgggtccgttcagctcgccgaccactaccagcagaatacgcccatcggtgacggcccggtgctgttgccggataaccactacttgtccacccagtctgcattgtccaaggaccctaacgaaaagcgggaccacatggtcctgcttgagttcgttacggccgcgggcatcacactgggcatggacgagttgtacaagaggtcacgcgacatctcgcatggctttccgccagcggtggcagcacaggatgatgggacacttcccatgtcctgtgctcaggagtccggcatggacaggcacccggccgcctgtgcgtcggcacggattaatgtatag

SEQ ID NO: 797 - DNA, 855 bp, Artificial Sequence
  Modified Open Reading Frame
atggtatcaaaaggagaagagctgttcacaggcgtagtacccatcctggtggagctcgacggcgacgtgaacggacacaagttcagcgtgtccggagagggcgaaggtgacgccacctacggcaagctgaccttgaagttcatctgtaccaccgggaaactccccgtgccctggcccacgctcgtgaccaccctcacgtacggggtccagtgcttcagtaggtaccccgaccacatgaagcagcacgacttcttcaagtcggccatgcccgagggctacgtccaggaaaggaccatcttctttaaggacgacggtaactataagactagagccgaggtgaagttcgagggtgacaccctggtgaacagaatcgagctgaagggcatcgacttcaaagaggatggcaacatcctgggccacaaactggagtacaactacaacagtcacaacgtgtatatcatggccgacaagcagaagaatggtataaaggtgaacttcaagatcagacacaatatcgaggacgggagcgtccagctcgccgatcactaccagcagaacacaccgatcggcgacggcccggtgctcctgcccgataaccattatctgagcactcagagcgccctctccaaggaccctaatgagaagagagatcacatggtgctgctcgagttcgttactgccgcgggtatcaccctcggcatggacgagctctacaaaaggtcccgcgacatcagccacggctttcctccagccgtggctgcccaagatgacgggaccttgccgatgagctgcgcccaggagtcgggcatggatagacatccagcagcatgtgccagcgcaaggatcaacgtataa

SEQ ID NO: 798 - DNA, 855 bp, Artificial Sequence
  Modified Open Reading Frame
atggtatcgaagggagaggaattgttcaccggtgtggtgccaatactggtggagctggacggcgacgtgaacggccacaagttctcggtgtctggcgagggcgagggcgacgccacttatggcaagcttaccctgaagttcatctgcactacggggaagctgcccgtgccctggcccaccctggtgaccacactgacctacggcgtgcagtgcttcagtcggtaccccgaccacatgaagcagcacgacttcttcaagtcggccatgcccgaggggtatgtgcaggagcggaccatcttctttaaagacgatggcaattacaaaacccgcgccgaggtgaagttcgagggcgacaccttggtgaaccggattgagctaaaaggcatcgactttaaagaagatggcaacatcctgggccacaagttggagtacaactacaactcccacaatgtgtatatcatggccgacaagcagaagaacggcatcaaggtgaattttaagatcagacacaacatcgaggacggctctgttcagctcgccgaccactaccagcagaatacgcccatcggtgacggcccggtgctgttgccggataaccactacttgtccacccagtctgcattgtccaaggaccctaacgaaaagcgggaccacatggtcctgcttgagttcgttacggccgcgggcatcacactgggcatggacgagttgtacaagaggtcacgcgacatctcgcatggctttccgccagcggtggcagcacaggatgatgggacacttcccatgtcctgtgctcaggagtccggcatggacaggcacccggccgcctgtgcgtcggcacggattaatgtatag

SEQ ID NO: 799 - DNA, 855 bp, Artificial Sequence
  Modified Open Reading Frame
atggtatcgaagggagaggaattgttcaccggtgtggtgccaatactggtggagctggacggcgacgtgaacggccacaagttctcggtgtctggcgagggcgagggcgacgccacttatggcaagcttaccctgaagttcatctgcactacggggaagctgcccgtgccctggcccaccctggtgaccacactgacctacggcgtgcagtgcttcagtcggtaccccgaccacatgaagcagcacgacttcttcaagtcggccatgcccgaggggtatgtgcaggagcggaccatcttctttaaagacgatggcaattataaaacccgtgccgaggtgaagttcgagggcgacaccttggtcaacaggattgaattaaaaggcatcgactttaaagaagatggcaacatcctgggccacaagttggagtacaactacaactcccacaatgtgtatatcatggccgacaagcagaagaacggcatcaaggtgaattttaagatcagacacaacatcgaggacggctctgttcagctcgccgaccactaccagcagaatacgcccatcggtgacggcccggtgctgttgccggataaccactacttgtccacccagtctgcattgtccaaggaccctaacgaaaagcgggaccacatggtcctgcttgagttcgttacggccgcgggcatcacactgggcatggacgagttgtacaagaggtcacgcgacatctcgcatggctttccgccagcggtggcagcacaggatgatgggacacttcccatgtcctgtgctcaggagtccggcatggacaggcacccggccgcctgtgcgtcggcacggattaatgtatag

SEQ ID NO: 800 - DNA, 855 bp, Artificial Sequence
  Modified Open Reading Frame
atggtatcgaagggagaggaattgttcaccggtgtggtgccaatactggtggagctggacggcgacgtgaacggccacaagttctcggtgtctggcgagggcgagggcgacgccacttatggcaagcttaccctgaagttcatctgcactacggggaagctgcccgtgccctggcccaccctggtgaccacactgacctacggcgtgcagtgcttcagtcggtaccccgaccacatgaagcagcacgacttcttcaagtcggccatgcccgaggggtatgtgcaggagcggaccatcttctttaaagacgatggcaattataaaacccgtgccgaggtgaagttcgagggcgacaccttggtcaacaggattgaattaaaaggcatcgactttaaagaagatggcaacatcctgggccacaagttagagtacaactacaactctcacaatgtgtatatcatggccgacaagcagaagaacggcatcaaggtgaattttaagatcagacacaacatcgaggacggctctgttcagctcgccgaccactaccagcagaatacgcccatcggtgacggcccggtgctgttgccggataaccactacttgtccacccagtctgcattgtccaaggaccctaacgaaaagcgggaccacatggtcctgcttgagttcgttacggccgcgggcatcacactgggcatggacgagttgtacaagaggtcacgcgacatctcgcatggctttccgccagcggtggcagcacaggatgatgggacacttcccatgtcctgtgctcaggagtccggcatggacaggcacccggccgcctgtgcgtcggcacggattaatgtatag

SEQ ID NO: 801 - DNA, 855 bp, Artificial Sequence
  Modified Open Reading Frame
atggtatcgaagggagaggaattgttcaccggtgtggtgccaatactggtggagctggacggcgacgtgaacggccacaagttctcggtgtctggcgagggcgagggcgacgccacttatggcaagctcaccctgaagttcatctgcaccacggggaagctgcccgtgccctggcccaccctggtgaccacactgacctacggcgtgcagtgcttcagtcggtaccccgaccacatgaagcagcacgacttcttcaagtcggccatgcccgaggggtatgtgcaggagcggaccatcttctttaaagacgatggcaattataaaacccgtgccgaggtgaagttcgagggcgacaccttggtcaacaggattgaattaaaaggcatcgactttaaagaagatggcaacatcctgggccacaagttagagtacaactacaactctcacaatgtgtatatcatggccgacaagcagaagaacggcatcaaggtgaattttaagatcagacacaacatcgaggacggctctgttcagctcgccgaccactaccagcagaatacgcccatcggtgacggcccggtgctgttgccggataaccactacttgtccacccagtctgcattgtccaaggaccctaacgaaaagcgggaccacatggtcctgcttgagttcgttacggccgcgggcatcacactgggcatggacgagttgtacaagaggtcacgcgacatctcgcatggctttccgccagcggtggcagcacaggatgatgggacacttcccatgtcctgtgctcaggagtccggcatggacaggcacccggccgcctgtgcgtcggcacggattaatgtatag

SEQ ID NO: 802 - DNA, 855 bp, Artificial Sequence
  Modified Open Reading Frame
atggtatcaaaaggagaagagctgttcacaggcgtagtacctatcctggtggagctcgacggcgacgtgaacggacacaagtttagcgtgtccggagagggcgaaggtgacgccacctacggcaagctgaccttgaagttcatctgtaccaccgggaaactccccgtgccctggcccacgctcgtgaccaccctcacgtacggggtccagtgcttcagtaggtaccccgaccacatgaagcagcacgacttcttcaagtcggccatgcccgagggctacgtccaggaaaggaccatcttctttaaggacgacggtaactataagactagagccgaggtgaagttcgagggtgacaccctggtgaacagaatcgagctgaagggcatcgacttcaaagaggatggcaacatcctgggccacaaactggagtacaactacaacagtcacaacgtgtatatcatggccgacaagcagaagaatggtataaaggtgaactttaagatcagacacaatatcgaggacgggagcgtccagctcgccgatcactaccagcagaacacaccgatcggcgacggcccggtgctcctgcccgataaccattatctgagcactcagagcgccctctccaaggaccctaatgagaagagagatcacatggtgctgctcgagttcgttactgccgcgggtatcaccctcggcatggacgagctctacaaaaggtcccgcgacatcagccacggctttcctccagccgtggctgcccaagatgacgggaccttgccgatgagctgcgcccaggagtcgggcatggatagacatccagcagcatgtgccagcgcaaggatcaacgtataa

SEQ ID NO: 803 - DNA, 855 bp, Artificial Sequence
  Modified Open Reading Frame
atggtatcgaagggagaggaattgttcaccggtgtggtgccaatactggtggagctggacggcgacgtgaacggccacaagttctcggtgtctggcgagggcgagggcgacgccacttatggcaagctcaccctgaagttcatctgcaccacggggaagctgcccgtgccctggcccaccctggtgaccaccctgacctacggcgtgcagtgcttcagtcggtaccccgaccacatgaagcagcacgacttcttcaagtcggccatgcccgaggggtatgtgcaggagcggaccatcttctttaaagacgatggcaattataaaacccgtgccgaggtgaagttcgagggcgacaccttggtcaacaggattgaattaaaaggcatcgactttaaagaagatggcaacatcctgggccacaagttagagtacaactacaactctcacaatgtgtatatcatggccgacaagcagaagaacggcatcaaggtgaattttaagatcagacacaacatcgaggacggctctgttcagctcgccgaccactaccagcagaatacgcccatcggtgacggcccggtgcttttgccggataaccactacttgtccacccagtctgcattgtccaaggaccctaacgaaaagcgggaccacatggtcctgcttgagttcgttacggccgcgggcatcacactgggcatggacgagttgtacaagaggtcccgcgacatctcccatggctttccgccagcggtggcagcacaggatgacgggacactgcccatgtcctgcgctcaggagtccggcatggacaggcacccggccgcctgtgcgtcagcacggattaatgtatag

SEQ ID NO: 804 - DNA, 855 bp, Artificial Sequence
  Modified Open Reading Frame
atggtatcaaaaggagaagagctgttcacaggcgtagtacctatcctggtggagctcgacggcgacgtgaacggacacaagtttagcgtgtccggagagggcgaaggtgacgccacctacggcaagctgaccttgaagttcatctgtaccaccgggaaactccccgtgccctggcccacgctcgtgaccaccctcacgtacggggtccagtgcttcagtaggtaccccgaccacatgaagcagcacgacttcttcaagtcggccatgcccgagggctacgtccaggaaaggaccatcttctttaaggacgacggtaactataagactagagccgaggtgaagttcgagggtgacaccctggtgaacagaatcgagctgaagggcatcgacttcaaagaggatggcaacatcctgggccacaaactggagtacaactacaacagtcacaacgtgtatatcatggccgacaagcagaagaatggtataaaggtgaactttaagatcagacacaatatcgaggacgggagcgtccagctcgccgatcactaccagcagaacacaccgatcggcgacggcccggtgctcctgcccgataaccattatctgagcactcagagcgccctctccaaggacccaaacgagaagagagatcacatggtgctgctcgagttcgttactgccgcgggtatcaccctcggcatggacgagctctacaagaggtcccgcgacatcagccacggctttcctccagccgtggctgcccaagacgacgggaccctgccgatgagctgcgcccaggagtcgggcatggatagacacccagcagcatgtgccagcgcaaggatcaacgtataa

SEQ ID NO: 805 - DNA, 855 bp, Artificial Sequence
  Modified Open Reading Frame
atggtatcaaaaggagaagagctgttcacaggcgtagtacctatcctggtggagctcgacggcgacgtgaacggacacaagtttagcgtgtccggagagggcgaaggtgacgccacctacggcaagctgaccttgaagttcatctgcaccaccgggaaactccccgtgccctggcccacgctcgtgaccaccctcacgtacggggtccagtgcttcagtaggtaccccgaccacatgaagcagcacgacttcttcaagtcggccatgcccgagggctacgtccaggaaaggaccatcttctttaaggacgacggtaactataagactagagccgaggtgaagttcgagggtgacaccctggtgaacagaatcgagctgaagggcatcgacttcaaagaggatggcaacatcctgggccacaaactggagtacaactacaacagtcacaacgtgtatatcatggccgacaagcagaagaatgggatcaaggtgaactttaagatcagacacaatatcgaggacgggagcgtccagctcgccgatcactaccagcagaacacaccgatcggcgacggcccggtgctcctgcccgataaccattatctgagcactcagagcgccctctccaaggacccaaacgagaagagagatcacatggtgctgctcgagttcgttactgccgcgggtatcaccctcggcatggacgagctctacaagaggtcccgcgacatcagccacggctttcctccagccgtggctgcccaagacgacgggaccctgccgatgagctgcgcccaggagtcgggcatggatagacacccagcagcatgtgccagcgcaaggatcaacgtataa

SEQ ID NO: 806 - DNA, 855 bp, Artificial Sequence
  Modified Open Reading Frame
atggtctcgaaaggagaggaattgttcaccggtgtggtgccaatactggtggagctggacggcgacgtgaacggccacaagttctcggtgtctggcgagggcgagggcgacgccacttatggcaagctcaccctgaagttcatctgcaccacggggaagctgcccgtgccctggcccaccctggtgaccaccctgacctacggcgtgcagtgcttcagtcggtaccccgaccacatgaagcagcacgacttcttcaagtcggccatgcccgaggggtatgtgcaggagcggaccatcttctttaaagacgatggcaattataaaacccgtgccgaggtgaagttcgagggcgacaccttggtcaacaggattgaattaaaaggcatcgactttaaagaagatggcaacatcctgggccacaagttagagtacaactacaactctcacaatgtgtatatcatggccgacaagcagaagaacggcatcaaggtgaattttaagatcagacacaacatcgaggacggctctgttcagctcgccgaccactaccagcagaatacgcccatcggtgacggcccggtgcttttgccggataaccactacttgtccacccagtctgcattgtccaaggaccctaacgaaaagcgggaccacatggtcctgcttgagttcgttacggccgcgggcatcacactgggcatggacgagttgtacaagaggtcccgcgacatctcccatggctttccgccagcggtggcagcacaggatgacgggacactgcccatgtcctgcgctcaggagtccggcatggacaggcacccggccgcctgtgcgtcagcacggatcaacgtatag

SEQ ID NO: 807 - DNA, 855 bp, Artificial Sequence
  Modified Open Reading Frame
atggtatcaaaaggagaagagttgttcaccggcgttgtgccgattctagttgagttggacggagatgtcaacggtcataagttttcagtctctggagaaggagaaggtgacgcaacgtatggcaagctaactttaaagttcatctgtactactggtaagttgcccgttccatggccgacgctcgtgactacacttacctatggggtacagtgcttttcaagatatcctgatcacatgaagcagcacgatttcttcaaaagcgctatgcccgaggggtatgtgcaggaacgaacgatcttctttaaggacgacggcaactacaagacacgtgcagaggtaaagttcgagggcgatacgttggtcaaccgtatcgagctcaagggaatagactttaaggaagatggcaacatccttggacacaagctagaatacaattacaactcacacaacgtttatatcatggccgataagcagaagaatgggatcaaggtcaatttcaagatcagacataatatcgaggatggctccgtccagctcgccgaccactaccagcagaacacccctattggcgatggacctgttttgttgcccgacaatcactaccttagtacccaaagcgctctatcgaaagatccgaacgagaagagagatcacatggttctgttggagttcgtgaccgctgcgggtattacgctagggatggacgagctatataagaggtcccgcgacattagccatggttttccgccagcggtcgccgcgcaggacgatggcacccttcctatgtcgtgtgctcaggaaagtggcatggatcgccatcctgctgcttgtgcgagtgctagaataaatgtgtag

SEQ ID NO: 808 - DNA, 855 bp, Artificial Sequence
  Modified Open Reading Frame
atggtaagtaagggcgaggagctgttcaccggcgtggtgcccatcctggtggagctggacggcgacgtgaacggccacaagttctctgtgtctggcgagggcgagggcgatgccacctatggcaagcttaccctgaagttcatctgcactacagggaagctgcccgtgccctggcccaccctggtgacgaccctgacctacggcgtgcagtgcttcagtcggtaccccgaccacatgaagcagcacgacttcttcaagtcggccatgccggaggggtatgtccaggagcggaccatcttctttaaagacgatggcaattacaagacgcgtgccgaggtgaagttcgagggcgacaccttggtaaatcggattgaattaaaaggcatcgactttaaagaagatggcaacatcctgggccacaagttagagtacaactacaactctcacaacgtctatatcatggccgataagcagaagaacggcatcaaggtgaacttcaagatccggcacaacatcgaggacggctctgtgcagctcgccgaccactaccagcagaacacacccattggcgacggccccgtgctgttgccggacaaccattatttgtccacgcagtctgccctgtctaaggacccgaacgagaagcgggaccatatggtgctgctcgagttcgttacggccgcggggattacgctggggatggacgagctgtacaagagatcccgcgatatcagccacggctttcctcccgccgtggctgcacaggacgacgggaccctgccgatgagctgcgcccaggagtccggcatggacagacacccagcagcctgcgcaagcgcacgcatcaacgtgtga

SEQ ID NO: 809 - DNA, 855 bp, Artificial Sequence
  Modified Open Reading Frame
atggtaagcaaaggagaagagctgttcactggggtagtgcccatattggtggagctggacggggacgtaaacggccacaagttctccgtgtccggagaaggagaaggcgacgccacctatggcaagcttacgctgaaatttatctgcaccacaggcaaactgcctgtgccgtggccgaccctcgtgaccactctcacctatggggtgcagtgcttcagtcggtaccccgatcacatgaagcaacatgactttttcaagtcggccatgcccgagggctacgtccaggagcggaccatattctttaaagacgatggcaactacaagactcgggctgaggtgaagttcgagggagacactttggtgaatcggattgagctgaaagggattgactttaaggaggatggcaacattctggggcacaagctcgagtacaactacaactcgcacaacgtgtacatcatggccgacaagcagaagaatggcatcaaggtcaactttaagattcggcacaatattgaggacgggtctgtgcaactcgctgatcactaccagcagaacacgcccataggtgacggaccagtgttactgcccgacaaccattacttgtcgacgcagtccgcgctttcgaaggatcccaacgaaaagcgtgatcacatggtcctgctggagttcgttacagctgcagggatcaccttgggcatggacgagttgtacaagagatctcgtgacatcagccacggctttcctccagccgtggccgcacaggacgatggcaccctgccaatgtcctgtgcccaggagagcggcatggacaggcatcctgccgcctgtgccagtgcgaggataaatgtctaa

SEQ ID NO: 810 - DNA, 855 bp, Artificial Sequence
  Modified Open Reading Frame
atggtatcaaaaggagaagagctgttcacaggcgtagtacctatcctggtggagctggacggcgacgtgaacggacacaagtttagcgtgtccggagagggcgaaggtgacgccacctacggcaagctgaccttgaagttcatctgcaccaccgggaaactccccgtgccctggcccacgctcgtgaccaccctcacgtacggggtccagtgcttcagcagataccccgaccacatgaagcagcacgacttcttcaagtcggccatgcccgagggctacgtgcaggaaaggaccatcttctttaaggacgacggtaactataagaccagagccgaggtgaagttcgagggagacaccctggtgaacagaatcgagctgaagggcatcgacttcaaagaggatggcaacatcctgggccacaaactggagtacaactacaacagtcacaacgtgtacatcatggccgacaagcagaagaacgggatcaaggtgaactttaagatcagacacaatatcgaggacgggagcgtccagctcgccgatcactaccagcagaacacaccgatcggcgacggcccggtgctcctgcccgataaccattatctgagcactcagagcgccctctccaaggacccaaacgagaagagagatcacatggtgctgctcgagttcgttaccgccgccggcatcaccctcggcatggacgagctctacaagaggtcccgcgacatcagccacggctttcctccagccgtggctgcccaagacgacgggaccctgcccatgagctgcgcccaggagtcgggcatggatagacacccagcagcatgtgcaagcgcaaggatcaacgtataa

SEQ ID NO: 811 - DNA, 855 bp, Artificial Sequence
  Modified Open Reading Frame
atggtaagcaaaggagaagagctgttcactggggtagtgcccatattggtggagctggacggggacgtaaacggccacaagttctccgtgtccggagaaggagaaggcgacgccacctatggcaagcttacgctgaaatttatctgcaccacaggcaaactgcctgtgccgtggccgaccctcgtgaccactctcacctatggggtgcagtgcttcagtcggtaccccgatcacatgaagcaacatgactttttcaagtcggccatgcccgagggctacgtccaggagcggacaatattctttaaagacgatggcaattacaagactcgggctgaggtgaagtttgagggagacactttggtgaatcggattgagctgaagggtattgattttaaggaggatggcaacattttgggacacaagctcgagtacaactacaactcgcacaacgtgtacatcatggccgacaagcagaagaatggcatcaaggtcaacttcaagattcggcacaatattgaggacgggtctgtgcaactcgctgatcactaccagcagaacacgcccataggcgacggaccagtgttactgcccgacaaccattacttgtcgacgcagtccgcgctttcgaaggatcccaacgaaaagcgtgatcacatggtcctgctggagttcgttacagctgcagggatcaccttgggcatggacgagttgtacaagagatctcgtgacatcagccacggctttcctccagccgtggccgcacaggacgatggcaccctgccaatgtcctgtgcccaggagagcggcatggacaggcatcctgccgcctgtgccagtgcgaggataaatgtctaa

SEQ ID NO: 812 - DNA, 855 bp, Artificial Sequence
  Modified Open Reading Frame
atggtaagcaaaggagaagagctgttcactggggtagtgcccatattggtggagctggacggggacgtaaacggccacaagttctccgtgtccggagaaggagaaggcgacgccacctatggcaagcttacgctgaaatttatctgcaccacaggcaaactgcctgtgccgtggccgaccctcgtgaccactctcacctatggggtgcagtgcttcagtcggtaccccgatcacatgaagcaacatgactttttcaagtcggccatgcccgagggctacgtccaggagcggactatattctttaaagacgatggcaattacaagactcgggccgaggtgaagtttgagggagacactttggtgaatcggattgagctgaagggtattgattttaaggaggatggcaacattttgggtcacaagctcgagtacaactacaactcgcacaacgtgtacatcatggccgacaagcagaagaatggcatcaaggtcaacttcaagattcggcacaatattgaggacgggtctgtgcaactcgctgatcactaccagcagaacacgcccataggcgacggaccagtgttactgcccgacaaccattacttgtcgacgcagtccgcgctttcgaaggatcccaacgaaaagcgtgatcacatggtcctgctggagttcgttacagctgcagggatcaccttgggcatggacgagttgtacaagagatctcgtgacatcagccacggctttcctccagccgtggccgcacaggacgatggcaccctgccaatgtcctgtgcccaggagagcggcatggacaggcatcctgccgcctgtgccagtgcgaggataaatgtctaa

SEQ ID NO: 813 - DNA, 855 bp, Artificial Sequence
  Modified Open Reading Frame
atggtaagcaaaggagaagagctgttcactggggtagtgcccatattggtggagctggacggggacgtaaacggccacaagttctccgtgtccggagaaggagaaggcgacgccacctatggcaagcttacgctgaaatttatctgcaccacaggcaaactgcctgtgccgtggccgaccctcgtgaccactctcacctatggggtgcagtgcttcagtcggtaccccgatcacatgaagcaacatgactttttcaagtcggccatgcccgagggctacgtccaggagcggactatattctttaaagacgatggcaattacaagactcgggctgaggtgaagtttgagggagacactttggtgaatcggattgagctgaaggggattgattttaaggaggatggcaacattttgggtcacaagctcgagtacaactacaactcgcacaacgtgtacatcatggccgacaagcagaagaatggcatcaaggtcaacttcaagattcggcacaatattgaggacgggtctgtgcaactcgctgatcactaccagcagaacacgcccataggcgacggaccagtgttactgcccgacaaccattacttgtcgacgcagtccgcgctttcgaaggatcccaacgaaaagcgtgatcacatggtcctgctggagttcgttacagctgcagggatcaccttgggcatggacgagttgtacaagagatctcgtgacatcagccacggctttcctccagccgtggccgcacaggacgatggcaccctgccaatgtcctgtgcccaggagagcggcatggacaggcatcctgccgcctgtgccagtgcgaggataaatgtctaa

SEQ ID NO: 814 - DNA, 855 bp, Artificial Sequence
  Modified Open Reading Frame
atggtaagcaaaggagaagagctgttcactggggtagtgcccatattggtggagctggacggggacgtaaacggccacaagttctccgtgtccggagaaggagaaggcgacgccacctatggcaagcttacgctgaaatttatctgcaccacaggcaaactgcctgtgccgtggccgaccctcgtgaccactctcacctatggggtgcagtgcttcagtcggtaccccgatcacatgaagcaacatgactttttcaagtcggccatgcccgagggctacgtccaggagcggactatattctttaaagacgatggcaattacaagactcgggctgaggtgaagtttgagggagacactttggtgaatcggattgagctgaaggggattgattttaaggaggatggcaacattttggggcacaagctcgagtacaactacaactcgcacaacgtgtacatcatggccgacaagcagaagaatggcatcaaggtcaacttcaagattcggcacaatattgaggacgggtctgtgcaactcgctgatcactaccagcagaacacgcccataggcgacggaccagtgttactgcccgacaaccattacttgtcgacgcagtccgcgctttcgaaggatcccaacgaaaagcgtgatcacatggtcctgctggagttcgttacagctgcagggatcaccttgggcatggacgagttgtacaagagatctcgtgacatcagccacggctttcctccagccgtggccgcacaggacgatggcaccctgccaatgtcctgtgcccaggagagcggcatggacaggcatcctgccgcctgtgccagtgcgaggataaatgtctaa

SEQ ID NO: 815 - DNA, 855 bp, Artificial Sequence
  Modified Open Reading Frame
atggtaagcaaaggagaagagctgttcactggggtagtgcccatattggtggagctggacggggacgtaaacggccacaagttctccgtgtccggagaaggagaaggcgacgccacctatggcaagcttacgctgaaatttatctgcaccacaggcaaactgcctgtgccgtggccgaccctcgtgaccactctcacctatggggtgcagtgcttcagtcggtaccccgatcacatgaagcaacatgactttttcaagtcggccatgcccgagggctacgtccaggagcggactatattctttaaagacgatggcaattacaagactcgggctgaggtgaagtttgagggagacactttggtgaatcggattgagctgaaggggattgattttaaggaggatggcaacattttgggacacaagctcgagtacaactacaactcgcacaacgtgtacatcatggccgacaagcagaagaatggcatcaaggtcaacttcaagattcggcacaatattgaggacgggtctgtgcaactcgctgatcactaccagcagaacacgcccataggcgacggaccagtgttactgcccgacaaccattacttgtcgacgcagtccgcgctttcgaaggatcccaacgaaaagcgtgatcacatggtcctgctggagttcgttacagctgcagggatcaccttgggcatggacgagttgtacaagagatctcgtgacatcagccacggctttcctccagccgtggccgcacaggacgatggcaccctgccaatgtcctgtgcccaggagagcggcatggacaggcatcctgccgcctgtgccagtgcgaggataaatgtctaa

SEQ ID NO: 816 - DNA, 855 bp, Artificial Sequence
  Modified Open Reading Frame
atggtaagcaaaggagaagagctgttcactggggtagtgcccatattggtggagctggacggggacgtaaacggccacaagttctccgtgtccggagaaggagaaggcgacgccacctatggcaagcttacgctgaaatttatctgcaccacaggcaaactgcctgtgccgtggccgaccctcgtgaccactctcacctatggggtgcagtgcttcagtcggtaccccgatcacatgaagcaacatgactttttcaagtcggccatgcccgagggctacgtccaggagcggaccatattctttaaagacgatggcaattacaagactcgggctgaggtgaagtttgagggagacactttggtgaatcggattgagctgaaggggattgattttaaggaggatggcaacattttgggtcacaagctcgagtacaactacaactcgcacaacgtgtacatcatggccgacaagcagaagaatggcatcaaggtcaacttcaagattcggcacaatattgaggacgggtctgtgcaactcgctgatcactaccagcagaacacgcccataggcgacggaccagtgttactgcccgacaaccattacttgtcgacgcagtccgcgctttcgaaggatcccaacgaaaagcgtgatcacatggtcctgctggagttcgttacagctgcagggatcaccttgggcatggacgagttgtacaagagatctcgtgacatcagccacggctttcctccagccgtggccgcacaggacgatggcaccctgccaatgtcctgtgcccaggagagcggcatggacaggcatcctgccgcctgtgccagtgcgaggataaatgtctaa

SEQ ID NO: 817 - DNA, 855 bp, Artificial Sequence
  Modified Open Reading Frame
atggtaagcaaaggagaagagctgttcactggggtagtgcccatattggtggagctggacggggacgtaaacggccacaagttctccgtgtccggagaaggagaaggcgacgccacctatggcaagcttacgctgaaatttatctgcaccacaggcaaactgcctgtgccgtggccgaccctcgtgaccactctcacctatggggtgcagtgcttcagtcggtaccccgatcacatgaagcaacatgactttttcaagtcggccatgcccgagggctacgtccaggagcggaccatattctttaaagacgatggcaattacaagactcgggctgaggtgaagtttgagggagacactttggtgaatcggattgagctgaaggggattgattttaaggaggatggcaacattttggggcacaagctcgagtacaactacaactcgcacaacgtgtacatcatggccgacaagcagaagaatggcatcaaggtcaacttcaagattcggcacaatattgaggacgggtctgtgcaactcgctgatcactaccagcagaacacgcccataggcgacggaccagtgttactgcccgacaaccattacttgtcgacgcagtccgcgctttcgaaggatcccaacgaaaagcgtgatcacatggtcctgctggagttcgttacagctgcagggatcaccttgggcatggacgagttgtacaagagatctcgtgacatcagccacggctttcctccagccgtggccgcacaggacgatggcaccctgccaatgtcctgtgcccaggagagcggcatggacaggcatcctgccgcctgtgccagtgcgaggataaatgtctaa

SEQ ID NO: 818 - DNA, 855 bp, Artificial Sequence
  Modified Open Reading Frame
atggtaagcaaaggagaagagctgttcactggggtagtgcccatattggtggagctggacggggacgtaaacggccacaagttctccgtgtccggagaaggagaaggcgacgccacctatggcaagcttacgctgaaatttatctgcaccacaggcaaactgcctgtgccgtggccgaccctcgtgaccactctcacctatggggtgcagtgcttcagtcggtaccccgatcacatgaagcaacatgactttttcaagtcggccatgcccgagggctacgtccaggagcggacaatattctttaaagacgatggcaattacaagactcgggctgaggtgaagtttgagggagacactttggtgaatcggattgagctgaaggggattgattttaaggaggatggcaacattttgggtcacaagctcgagtacaactacaactcgcacaacgtgtacatcatggccgacaagcagaagaatggcatcaaggtcaacttcaagattcggcacaatattgaggacgggtctgtgcaactcgctgatcactaccagcagaacacgcccataggcgacggaccagtgttactgcccgacaaccattacttgtcgacgcagtccgcgctttcgaaggatcccaacgaaaagcgtgatcacatggtcctgctggagttcgttacagctgcagggatcaccttgggcatggacgagttgtacaagagatctcgtgacatcagccacggctttcctccagccgtggccgcacaggacgatggcaccctgccaatgtcctgtgcccaggagagcggcatggacaggcatcctgccgcctgtgccagtgcgaggataaatgtctaa

SEQ ID NO: 819 - DNA, 855 bp, Artificial Sequence
  Modified Open Reading Frame
atggtaagcaaaggagaagagctgttcactggggtagtgcccatattggtggagctggacggggacgtaaacggccacaagttctccgtgtccggagaaggagaaggcgacgccacctatggcaagcttacgctgaaatttatctgcaccacaggcaaactgcctgtgccgtggccgaccctcgtgaccactctcacctatggggtgcagtgcttcagtcggtaccccgatcacatgaagcaacatgactttttcaagtcggccatgcccgagggctacgtccaggagcggacaatattctttaaagacgatggcaattacaagactcgggctgaggtgaagtttgagggagacactttggtgaatcggattgagctgaaggggattgattttaaggaggatggcaacattttggggcacaagctcgagtacaactacaactcgcacaacgtgtacatcatggccgacaagcagaagaatggcatcaaggtcaacttcaagattcggcacaatattgaggacgggtctgtgcaactcgctgatcactaccagcagaacacgcccataggcgacggaccagtgttactgcccgacaaccattacttgtcgacgcagtccgcgctttcgaaggatcccaacgaaaagcgtgatcacatggtcctgctggagttcgttacagctgcagggatcaccttgggcatggacgagttgtacaagagatctcgtgacatcagccacggctttcctccagccgtggccgcacaggacgatggcaccctgccaatgtcctgtgcccaggagagcggcatggacaggcatcctgccgcctgtgccagtgcgaggataaatgtctaa

SEQ ID NO: 820 - DNA, 855 bp, Artificial Sequence
  Modified Open Reading Frame
atggtaagcaaaggagaagagctgttcactggggtagtgcccatattggtggagctggacggggacgtaaacggccacaagttctccgtgtccggagaaggagaaggcgacgccacctatggcaagcttacgctgaaatttatctgcaccacaggcaaactgcctgtgccgtggccgaccctcgtgaccactctcacctatggggtgcagtgcttcagtcggtaccccgatcacatgaagcaacatgactttttcaagtcggccatgcccgagggctacgtccaggagcggactatattctttaaagacgatggcaattacaagactcgggcggaggtgaagtttgagggagacactttggtgaatcggattgagctgaaggggattgattttaaggaggatggcaacattttgggtcacaagctcgagtacaactacaactcgcacaacgtgtacatcatggccgacaagcagaagaatggcatcaaggtcaacttcaagattcggcacaatattgaggacgggtctgtgcaactcgctgatcactaccagcagaacacgcccataggcgacggaccagtgttactgcccgacaaccattacttgtcgacgcagtccgcgctttcgaaggatcccaacgaaaagcgtgatcacatggtcctgctggagttcgttacagctgcagggatcaccttgggcatggacgagttgtacaagagatctcgtgacatcagccacggctttcctccagccgtggccgcacaggacgatggcaccctgccaatgtcctgtgcccaggagagcggcatggacaggcatcctgccgcctgtgccagtgcgaggataaatgtctaa

SEQ ID NO: 821 - DNA, 855 bp, Artificial Sequence
  Modified Open Reading Frame
atggtaagcaaaggagaagagctgttcactggggtagtgcccatattggtggagctggacggggacgtaaacggccacaagttctccgtgtccggagaaggagaaggcgacgccacctatggcaagcttacgctgaaatttatctgcaccacaggcaaactgcctgtgccgtggccgaccctcgtgaccactctcacctatggggtgcagtgcttcagtcggtaccccgatcacatgaagcaacatgactttttcaagtcggccatgcccgagggctacgtccaggagcggacgatattctttaaagacgatggcaattacaagactcgggcggaggtgaagtttgagggagacactttggtgaatcggattgagctgaaggggattgattttaaggaggatggcaacattttgggacacaagctcgagtacaactacaactcgcacaacgtgtacatcatggccgacaagcagaagaatggcatcaaggtcaacttcaagattcggcacaatattgaggacgggtctgtgcaactcgctgatcactaccagcagaacacgcccataggcgacggaccagtgttactgcccgacaaccattacttgtcgacgcagtccgcgctttcgaaggatcccaacgaaaagcgtgatcacatggtcctgctggagttcgttacagctgcagggatcaccttgggcatggacgagttgtacaagagatctcgtgacatcagccacggctttcctccagccgtggccgcacaggacgatggcaccctgccaatgtcctgtgcccaggagagcggcatggacaggcatcctgccgcctgtgccagtgcgaggataaatgtctaa

SEQ ID NO: 822 - DNA, 855 bp, Artificial Sequence
  Modified Open Reading Frame
atggtaagcaaaggagaagagctgttcactggggtagtgcccatattggtggagctggacggggacgtaaacggccacaagttctccgtgtccggagaaggagaaggcgacgccacctatggcaagcttacgctgaaatttatctgcaccacaggcaaactgcctgtgccgtggccgaccctcgtgaccactctcacctatggggtgcagtgcttcagtcggtaccccgatcacatgaagcaacatgactttttcaagtcggccatgcccgagggctacgtccaggagcggaccatattctttaaagacgatggcaattacaagactcgggcggaggtgaagtttgagggagacactttggtgaatcggattgagctgaaggggattgattttaaggaggatggcaacattttggggcacaagctcgagtacaactacaactcgcacaacgtgtacatcatggccgacaagcagaagaatggcatcaaggtcaacttcaagattcggcacaatattgaggacgggtctgtgcaactcgctgatcactaccagcagaacacgcccataggcgacggaccagtgttactgcccgacaaccattacttgtcgacgcagtccgcgctttcgaaggatcccaacgaaaagcgtgatcacatggtcctgctggagttcgttacagctgcagggatcaccttgggcatggacgagttgtacaagagatctcgtgacatcagccacggctttcctccagccgtggccgcacaggacgatggcaccctgccaatgtcctgtgcccaggagagcggcatggacaggcatcctgccgcctgtgccagtgcgaggataaatgtctaa

SEQ ID NO: 823 - DNA, 855 bp, Artificial Sequence
  Modified Open Reading Frame
atggtaagcaaaggagaagagctgttcactggggtagtgcccatattggtggagctggacggggacgtaaacggccacaagttctccgtgtccggagaaggagaaggcgacgccacctatggcaagcttacgctgaaatttatctgcaccacaggcaaactgcctgtgccgtggccgaccctcgtgaccactctcacctatggggtgcagtgcttcagtcggtaccccgatcacatgaagcaacatgactttttcaagtcggccatgcccgagggctacgtccaggagcggactatattctttaaagacgatggcaattacaagactcgggcagaggtgaagtttgagggagacactttggtgaatcggattgagctgaaggggattgattttaaggaggatggcaacattttgggtcacaagctcgagtacaactacaactcgcacaacgtgtacatcatggccgacaagcagaagaatggcatcaaggtcaacttcaagattcggcacaatattgaggacgggtctgtgcaactcgctgatcactaccagcagaacacgcccataggcgacggaccagtgttactgcccgacaaccattacttgtcgacgcagtccgcgctttcgaaggatcccaacgaaaagcgtgatcacatggtcctgctggagttcgttacagctgcagggatcaccttgggcatggacgagttgtacaagagatctcgtgacatcagccacggctttcctccagccgtggccgcacaggacgatggcaccctgccaatgtcctgtgcccaggagagcggcatggacaggcatcctgccgcctgtgccagtgcgaggataaatgtctaa

SEQ ID NO: 824 - DNA, 855 bp, Artificial Sequence
  Modified Open Reading Frame
atggtaagcaaaggagaagagctgttcactggggtagtgcccatattggtggagctggacggggacgtaaacggccacaagttctccgtgtccggagaaggagaaggcgacgccacctatggcaagcttacgctgaaatttatctgcaccacaggcaaactgcctgtgccgtggccgaccctcgtgaccactctcacctatggggtgcagtgcttcagtcggtaccccgatcacatgaagcaacatgactttttcaagtcggccatgcccgagggctacgtccaggagcggactatattctttaaagacgatggcaattacaagactcgggccgaggtgaagtttgagggagacactttggtgaatcggattgagctgaaggggattgattttaaggaggatggcaacattttgggtcacaagctcgagtacaactacaactcgcacaacgtgtacatcatggccgacaagcagaagaatggcatcaaggtcaacttcaagattcggcacaatattgaggacgggtctgtgcaactcgctgatcactaccagcagaacacgcccataggcgacggaccagtgttactgcccgacaaccattacttgtcgacgcagtccgcgctttcgaaggatcccaacgaaaagcgtgatcacatggtcctgctggagttcgttacagctgcagggatcaccttgggcatggacgagttgtacaagagatctcgtgacatcagccacggctttcctccagccgtggccgcacaggacgatggcaccctgccaatgtcctgtgcccaggagagcggcatggacaggcatcctgccgcctgtgccagtgcgaggataaatgtctaa

SEQ ID NO: 825 - DNA, 855 bp, Artificial Sequence
  Modified Open Reading Frame
atggtaagcaaaggagaagagctgttcactggggtagtgcccatattggtggagctggacggggacgtaaacggccacaagttctccgtgtccggagaaggagaaggcgacgccacctatggcaagcttacgctgaaatttatctgcaccacaggcaaactgcctgtgccgtggccgaccctcgtgaccactctcacctatggggtgcagtgcttcagtcggtaccccgatcacatgaagcaacatgactttttcaagtcggccatgcccgagggctacgtccaggagcggactatattctttaaagacgatggcaattacaagactcgggctgaggtgaagtttgagggagacactttggtgaatcggattgagctgaagggaattgattttaaggaggatggcaacattttgggtcacaagctcgagtacaactacaactcgcacaacgtgtacatcatggccgacaagcagaagaatggcatcaaggtcaacttcaagattcggcacaatattgaggacgggtctgtgcaactcgctgatcactaccagcagaacacgcccataggcgacggaccagtgttactgcccgacaaccattacttgtcgacgcagtccgcgctttcgaaggatcccaacgaaaagcgtgatcacatggtcctgctggagttcgttacagctgcagggatcaccttgggcatggacgagttgtacaagagatctcgtgacatcagccacggctttcctccagccgtggccgcacaggacgatggcaccctgccaatgtcctgtgcccaggagagcggcatggacaggcatcctgccgcctgtgccagtgcgaggataaatgtctaa

SEQ ID NO: 826 - DNA, 855 bp, Artificial Sequence
  Modified Open Reading Frame
atggtaagcaaaggagaagagctgttcactggggtagtgcccatattggtggagctggacggggacgtaaacggccacaagttctccgtgtccggagaaggagaaggcgacgccacctatggcaagcttacgctgaaatttatctgcaccacaggcaaactgcctgtgccgtggccgaccctcgtgaccactctcacctatggggtgcagtgcttcagtcggtaccccgatcacatgaagcaacatgactttttcaagtcggccatgcccgagggctacgtccaggagcggacgatattctttaaagacgatggcaattacaagactcgggcggaggtgaagtttgagggagacactttggtgaatcggattgagctgaagggaattgattttaaggaggatggcaacattttgggtcacaagctcgagtacaactacaactcgcacaacgtgtacatcatggccgacaagcagaagaatggcatcaaggtcaacttcaagattcggcacaatattgaggacgggtctgtgcaactcgctgatcactaccagcagaacacgcccataggcgacggaccagtgttactgcccgacaaccattacttgtcgacgcagtccgcgctttcgaaggatcccaacgaaaagcgtgatcacatggtcctgctggagttcgttacagctgcagggatcaccttgggcatggacgagttgtacaagagatctcgtgacatcagccacggctttcctccagccgtggccgcacaggacgatggcaccctgccaatgtcctgtgcccaggagagcggcatggacaggcatcctgccgcctgtgccagtgcgaggataaatgtctaa

SEQ ID NO: 827 - DNA, 855 bp, Artificial Sequence
  Modified Open Reading Frame
atggtaagcaaaggagaagagctgttcactggggtagtgcccatattggtggagctggacggggacgtaaacggccacaagttctccgtgtccggagaaggagaaggcgacgccacctatggcaagcttacgctgaaatttatctgcaccacaggcaaactgcctgtgccgtggccgaccctcgtgaccactctcacctatggggtgcagtgcttcagtcggtaccccgatcacatgaagcaacatgactttttcaagtcggccatgcccgagggctacgtccaggagcggaccatattctttaaagacgatggcaattacaagactcgggcagaggtgaagtttgagggagacactttggtgaatcggattgagctgaagggaattgattttaaggaggatggcaacattttgggtcacaagctcgagtacaactacaactcgcacaacgtgtacatcatggccgacaagcagaagaatggcatcaaggtcaacttcaagattcggcacaatattgaggacgggtctgtgcaactcgctgatcactaccagcagaacacgcccataggcgacggaccagtgttactgcccgacaaccattacttgtcgacgcagtccgcgctttcgaaggatcccaacgaaaagcgtgatcacatggtcctgctggagttcgttacagctgcagggatcaccttgggcatggacgagttgtacaagagatctcgtgacatcagccacggctttcctccagccgtggccgcacaggacgatggcaccctgccaatgtcctgtgcccaggagagcggcatggacaggcatcctgccgcctgtgccagtgcgaggataaatgtctaa

SEQ ID NO: 828 - DNA, 855 bp, Artificial Sequence
  Modified Open Reading Frame
atggtaagcaaaggagaagagctgttcactggggtagtgcccatattggtggagctggacggggacgtaaacggccacaagttctccgtgtccggagaaggagaaggcgacgccacctatggcaagcttacgctgaaatttatctgcaccacaggcaaactgcctgtgccgtggccgaccctcgtgaccactctcacctatggggtgcagtgcttcagtcggtaccccgatcacatgaagcaacatgactttttcaagtcggccatgcccgagggctacgtccaggagcggacaatattctttaaagacgatggcaattacaagactcgggcagaggtgaagtttgagggagacactttggtgaatcggattgagctgaagggcattgattttaaggaggatggcaacattttgggtcacaagctcgagtacaactacaactcgcacaacgtgtacatcatggccgacaagcagaagaatggcatcaaggtcaacttcaagattcggcacaatattgaggacgggtctgtgcaactcgctgatcactaccagcagaacacgcccataggcgacggaccagtgttactgcccgacaaccattacttgtcgacgcagtccgcgctttcgaaggatcccaacgaaaagcgtgatcacatggtcctgctggagttcgttacagctgcagggatcaccttgggcatggacgagttgtacaagagatctcgtgacatcagccacggctttcctccagccgtggccgcacaggacgatggcaccctgccaatgtcctgtgcccaggagagcggcatggacaggcatcctgccgcctgtgccagtgcgaggataaatgtctaa

SEQ ID NO: 829 - DNA, 855 bp, Artificial Sequence
  Modified Open Reading Frame
atggtaagcaaaggagaagagctgttcactggggtagtgcccatattggtggagctggacggggacgtaaacggccacaagttctccgtgtccggagaaggagaaggcgacgccacctatggcaagcttacgctgaaatttatctgcaccacaggcaaactgcctgtgccgtggccgaccctcgtgaccactctcacctatggggtgcagtgcttcagtcggtaccccgatcacatgaagcaacatgactttttcaagtcggccatgcccgagggctacgtccaggagcggacaatattctttaaagacgatggcaattacaagactcgggcagaggtgaagtttgagggagacactttggtgaatcggattgagctgaagggcattgattttaaggaggatggcaacattttgggacacaagctcgagtacaactacaactcgcacaacgtgtacatcatggccgacaagcagaagaatggcatcaaggtcaacttcaagattcggcacaatattgaggacgggtctgtgcaactcgctgatcactaccagcagaacacgcccataggcgacggaccagtgttactgcccgacaaccattacttgtcgacgcagtccgcgctttcgaaggatcccaacgaaaagcgtgatcacatggtcctgctggagttcgttacagctgcagggatcaccttgggcatggacgagttgtacaagagatctcgtgacatcagccacggctttcctccagccgtggccgcacaggacgatggcaccctgccaatgtcctgtgcccaggagagcggcatggacaggcatcctgccgcctgtgccagtgcgaggataaatgtctaa

SEQ ID NO: 830 - DNA, 855 bp, Artificial Sequence
  Modified Open Reading Frame
atggtaagcaaaggagaagagctgttcactggggtagtgcccatattggtggagctggacggggacgtaaacggccacaagttctccgtgtccggagaaggagaaggcgacgccacctatggcaagcttacgctgaaatttatctgcaccacaggcaaactgcctgtgccgtggccgaccctcgtgaccactctcacctatggggtgcagtgcttcagtcggtaccccgatcacatgaagcaacatgactttttcaagtcggccatgcccgagggctacgtccaggagcggaccatattctttaaagacgatggcaattacaagactcgggcagaggtgaagtttgagggagacactttggtgaatcggattgagctgaagggtattgattttaaggaggatggcaacattttgggccacaagctcgagtacaactacaactcgcacaacgtgtacatcatggccgacaagcagaagaatggcatcaaggtcaacttcaagattcggcacaatattgaggacgggtctgtgcaactcgctgatcactaccagcagaacacgcccataggcgacggaccagtgttactgcccgacaaccattacttgtcgacgcagtccgcgctttcgaaggatcccaacgaaaagcgtgatcacatggtcctgctggagttcgttacagctgcagggatcaccttgggcatggacgagttgtacaagagatctcgtgacatcagccacggctttcctccagccgtggccgcacaggacgatggcaccctgccaatgtcctgtgcccaggagagcggcatggacaggcatcctgccgcctgtgccagtgcgaggataaatgtctaa

SEQ ID NO: 831 - DNA, 855 bp, Artificial Sequence
  Modified Open Reading Frame
atggtaagcaaaggagaagagctgttcactggggtagtgcccatattggtggagctggacggggacgtaaacggccacaagttctccgtgtccggagaaggagaaggcgacgccacctatggcaagcttacgctgaaatttatctgcaccacaggcaaactgcctgtgccgtggccgaccctcgtgaccactctcacctatggggtgcagtgcttcagtcggtaccccgatcacatgaagcaacatgactttttcaagtcggccatgcccgagggctacgtccaggagcggaccatattctttaaagacgatggcaattacaagactcgggcagaggtgaagtttgagggagacactttggtgaatcggattgagctgaaggggattgattttaaggaggatggcaacattttgggccacaagctcgagtacaactacaactcgcacaacgtgtacatcatggccgacaagcagaagaatggcatcaaggtcaacttcaagattcggcacaatattgaggacgggtctgtgcaactcgctgatcactaccagcagaacacgcccataggcgacggaccagtgttactgcccgacaaccattacttgtcgacgcagtccgcgctttcgaaggatcccaacgaaaagcgtgatcacatggtcctgctggagttcgttacagctgcagggatcaccttgggcatggacgagttgtacaagagatctcgtgacatcagccacggctttcctccagccgtggccgcacaggacgatggcaccctgccaatgtcctgtgcccaggagagcggcatggacaggcatcctgccgcctgtgccagtgcgaggataaatgtctaa

SEQ ID NO: 832 - DNA, 855 bp, Artificial Sequence
  Modified Open Reading Frame
atggtaagcaaaggagaagagctgttcactggggtagtgcccatattggtggagctggacggggacgtaaacggccacaagttctccgtgtccggagaaggagaaggcgacgccacctatggcaagcttacgctgaaatttatctgcaccacaggcaaactgcctgtgccgtggccgaccctcgtgaccactctcacctatggggtgcagtgcttcagtcggtaccccgatcacatgaagcaacatgactttttcaagtcggccatgcccgagggctacgtccaggagcggacaatattctttaaagacgatggcaattacaagactcgggccgaggtgaagtttgagggagacactttggtgaatcggattgagctgaagggcattgattttaaggaggatggcaacattttgggacacaagctcgagtacaactacaactcgcacaacgtgtacatcatggccgacaagcagaagaatggcatcaaggtcaacttcaagattcggcacaatattgaggacgggtctgtgcaactcgctgatcactaccagcagaacacgcccataggcgacggaccagtgttactgcccgacaaccattacttgtcgacgcagtccgcgctttcgaaggatcccaacgaaaagcgtgatcacatggtcctgctggagttcgttacagctgcagggatcaccttgggcatggacgagttgtacaagagatctcgtgacatcagccacggctttcctccagccgtggccgcacaggacgatggcaccctgccaatgtcctgtgcccaggagagcggcatggacaggcatcctgccgcctgtgccagtgcgaggataaatgtctaa

SEQ ID NO: 833 - DNA, 855 bp, Artificial Sequence
  Modified Open Reading Frame
atggtaagtaagggcgaggagctgttcaccggcgtggtgcccatcctggtggagctggacggcgacgtgaacggccacaagttctctgtgtctggcgagggcgagggcgacgccacctacggcaagctcaccctgaagttcatctgcaccaccgggaagctgcccgtgccctggcccaccctggtgaccaccctgacctacggcgtgcagtgcttcagtcggtaccccgaccacatgaagcagcacgacttcttcaagtcggccatgcccgaggggtatgtgcaggagcggaccatcttctttaaagacgatggcaattataaaacccgtgccgaggtgaagttcgagggcgacaccttggtcaacaggattgaattaaaaggcatcgactttaaagaagatggcaacatcctgggccacaagttagagtacaactacaactctcacaatgtgtatatcatggccgacaagcagaagaacggcatcaaggtgaacttcaagatccggcacaacatcgaggacggctctgtgcagctggccgaccactaccagcagaacacccccatcggcgacggccccgtgctgttgcccgacaatcattacctgtctacccagtctgccctgtctaaggaccccaacgagaagcgggaccacatggtgctgctggagttcgtgaccgccgccggcatcacgctgggcatggacgagctgtacaagagatcccgcgacatcagccacggctttcctcccgccgtggccgcccaagacgacgggaccctgccgatgagctgcgcccaggagtccggcatggacagacacccagcagcctgcgcaagcgcacgcatcaacgtgtga

SEQ ID NO: 834 - DNA, 855 bp, Artificial Sequence
  Modified Open Reading Frame
atggtatcaaaaggagaagagctgttcacaggcgtagtacctatcctggtggagctggacggcgacgtgaacggacacaagtttagcgtgtccggagagggcgaaggtgacgccacctacggcaagctgaccttgaagttcatctgcaccaccggcaaactgcccgtgccctggcccacgctcgtgaccaccctcacgtacggggtccagtgcttcagcagataccccgaccacatgaagcagcacgacttcttcaagtcggccatgcccgagggctacgtgcaggaaaggaccatcttctttaaggacgacggtaactataagaccagagccgaggtgaagttcgagggagacaccctggtgaacagaatcgagctgaagggcatcgacttcaaagaggatggcaacatcctgggccacaaactggagtacaactacaacagtcacaacgtgtacatcatggccgacaagcagaagaacggaatcaaggtgaactttaagatcagacacaatatcgaagacggcagcgtgcagctcgccgaccactaccagcagaacacacccatcggcgacggacccgtgctgctgcccgataaccattatctgagcactcagagcgccctctccaaggacccaaacgagaagagagatcacatggtgctgctcgagttcgttaccgccgccggcatcaccctcggcatggacgagctctacaagaggtcccgcgacatcagccacggctttcctccagccgtggctgcccaagacgacgggaccctgcccatgagctgcgcccaggagtcgggcatggatagacacccagcagcatgtgcaagcgcaaggatcaacgtataa

SEQ ID NO: 835 - DNA, 855 bp, Artificial Sequence
  Modified Open Reading Frame
atggtatcaaagggcgaggagctgttcaccggcgtggtcccgatcctggtggagctggacggcgacgtgaacggccacaagtttagcgtgtccggagagggcgaaggtgacgccacctacggcaagctgaccttgaagttcatctgcaccacgggcaaactgcccgtgccgtggcccaccctcgtgaccaccctgacctacggagtccagtgcttcagcagatatcccgaccatatgaagcagcacgacttcttcaagtccgccatgcccgagggctacgtccaggaaagaaccatcttctttaaggacgacggcaactataagactagagccgaggtgaagttcgagggagacaccctggtgaaccgaatcgagctgaagggcatcgacttcaaggaggacggcaatatcctgggccacaagctggagtacaactacaacagccacaacgtgtacatcatggccgacaaacagaagaacggtatcaaggtgaactttaagatcagacacaatatcgaggacgggagcgtccagctcgccgatcactaccagcagaacactccgatcggcgacggcccggtgctcctgcccgataaccattatctgagcactcagagcgccctctccaaggaccctaacgagaagagagatcacatggtgctgctcgagttcgttaccgccgccggcatcaccctcgggatggacgagctttacaagcggtcccgagacatcagccacggctttcctccagccgtggcagcccaagacgacggaacgctcccgatgagctgcgcgcaggagtccggcatggatagacatcctgccgcctgtgccagcgcacgtatcaacgtgtaa

SEQ ID NO: 836 - DNA, 855 bp, Artificial Sequence
  Modified Open Reading Frame
atggtatcaaaaggagaggagctgttcaccggcgtggttcccatcctggtggagctggacggcgacgtgaacggccacaagtttagcgtgtccggggagggcgagggtgatgccacctatggcaagctgaccttgaagttcatctgcacgaccgggaaactcccggtcccgtggcccaccctcgtgaccacgctgacttacggagtccagtgcttcagcaggtaccccgaccacatgaagcagcacgacttctttaagtcagcgatgcccgagggctacgtacaggaaagaaccatcttctttaaggacgacggaaactataagaccagagccgaggtgaagttcgagggtgacaccctcgtgaacagaatcgagctgaagggcatcgacttcaaagaggacggcaacatcctgggccacaagctggagtacaactacaacagccacaacgtgtacatcatggccgacaaacagaagaacggcatcaaggtgaactttaagatcagacacaatatcgaggacggcagcgtgcagctcgccgaccactaccagcagaacacgcccatcggcgatgggcctgtgctgctgcccgataatcattacctgagcacccagagcgccctctccaaggacccgaacgagaagcgggaccacatggtcctgctcgagttcgtgaccgccgccggcatcaccttgggcatggacgagctgtacaagcggtcccgtgacatcagccacggctttcctcccgccgtggctgcccaagacgatgggaccctgccgatgagctgcgcccaggaatccggcatggacagacacccagcagcctgcgcaagcgcaaggattaacgtgtaa

SEQ ID NO: 837 - DNA, 855 bp, Artificial Sequence
  Modified Open Reading Frame
atggtgagtaagggtgaggaactgttcaccggcgtggtcccaatactggtagagctggacggggacgtgaacggacataagttcagcgtgtccggcgagggtgagggcgatgccacctatggcaagctcaccctgaagtttatctgtaccacaggtaaactgccagtgccttggcccacgttggtgaccaccctcacatatggcgtgcaatgcttttcaaggtatccagaccatatgaaacagcatgatttcttcaagtccgccatgcctgaagggtacgtccaggaaagaaccatcttctttaaggacgacggaaattataaaacgcgtgctgaggtcaaattcgagggtgataccctcgtgaaccgaatcgagctgaaaggcatcgacttcaaggaagatggtaatatcctgggccacaaactcgagtataattacaacagtcacaatgtgtatattatggccgataaacagaaaaatgggatcaaagtaaactttaagatccggcataatatcgaggacggcagcgtgcaactcgccgatcattatcaacaaaatacaccgatcggcgatggtcccgtgctgctgcccgataaccattatctgagtacccaatccgctttgtcgaaggatcccaatgagaagcgtgatcatatggtactactcgagtttgtaactgccgcaggcattaccctaggcatggacgagctttacaagagatcgcgcgacataagccacggatttccgccagcggtagccgcgcaggacgacgggaccctgcccatgagctgtgctcaggagtccggcatggacaggcatcccgccgcctgcgcgtccgcgcggataaacgtgtaa

SEQ ID NO: 838 - DNA, 855 bp, Artificial Sequence
  Modified Open Reading Frame
atggtgagtaagggtgaggagctgttcaccggcgtggtgccaatactggtagagctggacggcgacgtgaacggacataagttcagcgtgtccggcgagggtgagggcgatgccacctatggcaagctcaccctcaagtttatctgtaccacaggtaaactgccagtgccttggcccacgttggtgaccaccctcacatatggcgtgcaatgcttttcaaggtatccagaccatatgaaacagcatgatttcttcaagtccgccatgcctgaagggtacgtccaggaaagaaccatcttctttaaggacgacggaaattataaaacgcgtgctgaggtcaaattcgagggtgataccctcgtgaaccgaatcgagctgaaaggcatcgacttcaaggaagatggtaatatcctgggccacaaactcgagtataattacaacagtcacaatgtgtatattatggccgataaacagaaaaatgggatcaaagtaaactttaagatccgacataatatcgaggacggcagcgtgcaactcgccgatcattatcaacaaaatacaccgatcggcgatggtcccgtgctgctgcccgataaccattatctgagtacccaatccgctttgtcgaaggatcccaatgagaagcgtgatcatatggtactactcgagtttgtgactgccgcaggcattaccctaggcatggacgagctttacaagagatcgcgcgacataagccacggatttccgccagcggtagccgcgcaggacgacgggaccctgcccatgagctgtgctcaggagtccggcatggacaggcatcccgccgcctgcgcgtccgcgcggataaacgtgtaa

SEQ ID NO: 839 - DNA, 855 bp, Artificial Sequence
  Modified Open Reading Frame
atggtgagtaagggtgaggagctgttcaccggggtggtgccaatactggtagagctggacggcgacgtgaacggacataagttcagcgtgtccggcgagggtgagggcgatgccacctatggcaagctcaccctcaagtttatctgtaccacaggtaaactgccagtgccttggcccaccttggtgaccaccctcacatatggcgtgcaatgcttttcaagatatccagatcatatgaaacagcatgatttcttcaagtccgccatgcctgaagggtacgtccaggaaagaaccatcttctttaaggacgacggaaattataaaacgcgtgctgaggtcaaattcgagggtgataccctcgtgaaccgaatcgagctgaaaggcatcgacttcaaggaagatggtaatatcctgggccacaaactcgagtataattacaacagtcacaatgtgtatattatggccgataaacagaaaaatggaatcaaagtaaactttaagattcgacataatatcgaggacggcagcgtacaactcgccgatcattatcaacaaaatacaccgatcggcgatggtcctgtgctgctgcccgataaccattatctgagtacccaatccgctttgtcgaaggatcccaatgagaagcgtgatcatatggtactactcgagtttgtgactgccgcaggcattaccctaggcatggacgagctttacaagagatcgcgcgacataagccacggatttcctccagcggtagccgcgcaggacgacgggaccctgcccatgagctgtgctcaggagtccggcatggacaggcatcccgccgcctgcgcgtccgcgaggataaacgtgtaa

SEQ ID NO: 840 - DNA, 855 bp, Artificial Sequence
  Modified Open Reading Frame
atggtgtccaagggcgaagagctttttacaggggtggttcctatactggtggaattggacggcgacgtgaacggccacaagttttctgtgagtggtgagggcgaaggcgacgccacatatggcaagctgaccctgaagttcatatgcacgacgggcaagttaccggtgccgtggcccaccctggtcaccaccctgacctacggagtccagtgcttctctcggtatccggatcatatgaaacagcatgacttcttcaagagtgctatgccagaaggttatgtccaggagcgtaccatcttctttaaagacgatggtaactacaaaacgagggccgaggtgaagttcgaaggagacaccctggtcaatcgtattgagttgaagggcatcgactttaaagaagatggtaacatccttggacataagcttgagtacaactataacagtcataatgtttacataatggccgataaacagaagaatggcatcaaggtaaactttaaaatccgtcataacattgaagacggcagcgtgcagttggcggaccactaccagcagaacacacccataggagacggtcccgttctgctgcccgacaaccactacctaagcacgcaatcagccctgtcaaaggaccccaacgagaagagggaccatatggtgctgcttgagttcgtcaccgccgccgggatcaccctgggcatggatgagctttataagcgcagccgtgacatcagccacggattcccgccggcggtggccgcgcaggacgacgggacgctgcccatgagctgcgcccaagagagcgggatggacagacatcccgcggcctgtgcctctgcgcgtataaacgtgtag

SEQ ID NO: 841 - DNA, 855 bp, Artificial Sequence
  Modified Open Reading Frame
atggtgtccaagggcgaagagctttttacaggggtggttcctatactggtggaattggacggcgacgtgaacggccacaagttttctgtgagtggtgagggcgaaggcgacgccacatatggcaagctgaccctgaagttcatatgcacgaccggcaagttaccggtgccgtggcccaccctggtcaccaccctgacctacggagtccagtgcttctctcggtatccggatcatatgaaacagcatgacttcttcaagagcgctatgccagaaggttatgtccaggagcgtaccatcttctttaaggacgatggtaactacaaaacgagggccgaggtgaagttcgagggagacaccctggtcaatcgtattgagttgaagggcatcgactttaaagaagatggtaacatccttggacataagctggagtacaactacaacagtcataatgtttacataatggccgataaacagaagaatggcatcaaggtaaactttaaaatccgtcataacattgaagacggcagcgtgcagttggcggaccactaccagcagaacacacccataggagacggtcccgtgctgctgcccgacaaccactacctaagcacgcaatcagccctgtcaaaggaccccaacgagaagagggaccatatggtgctgcttgagttcgtcaccgccgccgggatcaccctgggcatggatgagctttataagcgcagccgtgacatcagccacggattcccgccggcggtggccgcgcaggacgacgggacgctgcccatgagctgcgctcaagagagcgggatggacagacaccccgccgcctgtgccagcgcccggatcaacgtgtga

SEQ ID NO: 842 - DNA, 855 bp, Artificial Sequence
  Modified Open Reading Frame
atggtgtccaagggcgaagagctttttacaggggtggttcctatactggtggaattggacggcgacgtgaacggccacaagttttctgtgagtggtgagggcgaaggcgacgccacatatggcaagctgaccctgaagttcatatgcacgaccggcaagttaccggtgccgtggcccaccctggtcaccaccctgacctacggagtccagtgcttctctcggtatccggatcatatgaaacagcatgacttcttcaagagcgctatgccagaaggttatgtccaggagcgtaccatcttctttaaggacgatggtaactacaaaacgagggccgaggtgaagttcgagggagacaccctggtcaatcgtattgagttgaagggcatcgactttaaagaagatggtaacatccttggacataagctggagtacaactacaacagtcataatgtttacataatggccgataaacagaagaatggcatcaaggtaaactttaaaatccgtcataacattgaagacggcagcgtgcagttggcggaccactaccagcagaacacacccataggagacggtcccgtgctgctgcccgacaaccattacctaagcacgcaatcagccctgtcaaaggaccccaacgagaagagggaccatatggtgctgcttgagttcgtcaccgccgccgggatcaccctgggcatggatgagctttataagcgcagccgtgacatcagccacggattcccgccggcggtggccgcgcaggacgacgggacgctgcccatgagctgcgcccaagagagcgggatggacagacaccccgcggcctgtgccagcgcccggatcaacgtgtga

SEQ ID NO: 843 - DNA, 855 bp, Artificial Sequence
  Modified Open Reading Frame
atggtgtccaagggcgaagagctttttacaggggtggttcctatactggtggaattggacggcgacgtgaacggccacaagttttctgtgagtggtgagggcgaaggcgacgccacatatggcaagctgaccctgaagttcatatgcacgaccggcaagttaccggtgccgtggcccaccctggtcaccaccctgacctacggagtccagtgcttctctcggtatccggatcatatgaaacagcatgacttcttcaagagcgctatgccagaaggttatgtccaggagcgtaccatcttctttaaggacgatggtaactacaaaacgagggccgaggtgaagttcgagggagacaccctggtcaatcgtattgagttgaagggcatcgactttaaagaagatggtaacatccttggacataagctggagtacaactacaacagtcataatgtttacataatggccgataaacagaagaatggcatcaaggtaaactttaaaatccgtcataacattgaagacggcagcgtgcagttggcggaccactaccagcagaacacacccataggagacggtcccgtgctgctgcccgacaaccactacctaagcacgcaatcagccctgtcaaaggaccccaacgagaagagggaccatatggtgctgcttgagttcgtcaccgccgccgggatcaccctgggcatggatgagctttataagcgcagccgtgacatcagccacggattcccgccggcggtggccgcgcaggacgacgggacgctgcccatgagctgcgcccaagagagcgggatggacagacaccccgcggcctgtgccagcgcccggatcaacgtgtga

SEQ ID NO: 844 - DNA, 855 bp, Artificial Sequence
  Modified Open Reading Frame
atggtaagcaaaggagaggaactctttacaggggtagtaccgatcctggtcgagcttgacggcgacgtgaatggccacaagtttagcgtcagcggcgaaggtgaaggggatgccacctatgggaaactcactctgaagttcatctgcaccactgggaagctgccagtaccttggccgaccctagtgacgacgctgacctacggagtgcaatgctttagcaggtaccctgatcacatgaagcagcatgactttttcaagtcggccatgccggaaggctacgtccaggaacggactatcttttttaaagatgacggcaactataagacgcgtgctgaggtaaagttcgagggagacacgctggtcaaccgcattgagttgaagggtattgactttaaagaggatggcaatattctgggtcacaaacttgagtataactataatagtcataacgtttacatcatggctgacaaacagaagaatggcatcaaggttaactttaagatccgtcacaacatcgaggatggcagcgtgcaactcgccgatcattaccaacagaacactcctataggtgacggtccagtcttgcttcctgacaatcactatctctcgacgcagagtgccctctcaaaggaccctaatgagaagcgggatcacatggtgctcctggagtttgtgacggcagcggggataacactcggtatggacgagctctacaaaagaagccgggacatctcgcacgggtttcctcccgcggtggcggcgcaagatgacgggacactaccgatgagctgtgctcaggagagtggtatggacaggcaccctgcggcgtgtgctagtgccaggatcaacgtctga

SEQ ID NO: 845 - DNA, 855 bp, Artificial Sequence
  Modified Open Reading Frame
atggtatcaaaaggagaagagttatttacaggtgttgtacctattctagttgagttggacggagatgtcaacggtcataagttttcagtctctggagaaggagaaggtgacgcaacgtatggcaagctaactttaaagttcatctgtactactggtaagctgcccgttccatggccgacgctcgtgactacacttacctatggggtacagtgcttttcaagatatcctgatcacatgaagcagcacgatttcttcaaaagcgctatgcccgaggggtatgtgcaggaacgaacgatcttctttaaggacgacggcaactacaagacacgtgcagaggtaaagttcgagggcgatacgttggtcaaccgtatcgagctcaagggaatagactttaaggaagatggcaacatccttggacacaagctagaatacaattacaactcacacaatgtttatatcatggccgataagcagaagaatgggatcaaagtcaatttcaagatcagacataatatcgaggatggctccgtccagctcgccgaccactaccagcagaacacccctattggcgatggacctgttttgttgcccgacaatcactaccttagtacccaaagcgctctatcgaaagatccgaacgagaagagagatcatatggttctgttggagttcgtgaccgctgcgggtattacgctagggatggacgagctatataagaggtcccgcgacattagccatggttttccgccagcggtcgccgcgcaggacgatggcacccttcctatgtcgtgtgctcaggaaagtggcatggatcgccatcctgctgcttgtgccagtgctagaatcaatgtgtga

SEQ ID NO: 846 - DNA, 855 bp, Artificial Sequence
  Modified Open Reading Frame
atggtatcaaaaggagaagagttatttacaggtgttgtacctattctagttgagttggacggagatgtcaacggtcataagttttcagtctctggagaaggagaaggtgacgcaacgtatggcaagctaactttaaagttcatctgtactactggtaagctgcccgttccatggccgacgctcgtgactacacttacctatggggtacagtgcttttcaagatatcctgatcacatgaagcagcacgatttcttcaaaagcgctatgcccgaggggtatgtgcaggaacgaacgatcttctttaaggacgacggcaactacaagacacgtgcagaggtaaagttcgagggcgatacgttggtcaaccgtatcgagctcaagggaatagactttaaggaagatggcaacatccttggacacaagctagaatacaattacaactcacacaatgtttatatcatggccgataagcagaagaatgggatcaaagtcaatttcaagatcagacataatatcgaagatggctccgtccagctcgccgaccactaccagcagaacacccctattggcgatggacctgttttgttgcccgacaatcactaccttagtacccaaagcgctctatcgaaggatccgaacgagaagagagatcatatggttctgttggaattcgtgaccgctgcgggtattacgctagggatggacgagctatataagaggtcccgcgacattagccatggttttccgccagcggtcgccgcgcaggacgatggcaccttacctatgtcgtgtgctcaggaaagtggcatggatcgccatcctgctgcttgtgccagtgctagaatcaatgtgtga

SEQ ID NO: 847 - DNA, 855 bp, Artificial Sequence
  Modified Open Reading Frame
atggtatcaaaaggagaagagttatttacaggtgttgtacctattctagttgagttggacggagatgtcaacggtcataagttttcagtctctggagaaggagaaggtgacgcaacgtatggcaagctaactttaaagttcatctgtactactggtaagctgcccgttccatggccgacgctcgttactacacttacctatggggtacagtgcttttcaagatatcctgatcacatgaagcagcacgatttcttcaaaagcgctatgcccgaggggtatgtgcaggaacgaacgatcttctttaaggacgacggcaactacaagacacgtgccgaggtaaagttcgagggcgatacgttggtcaaccgtatcgagctcaagggaatagactttaaggaagatggcaacatccttggacacaagctagaatacaattacaactcacacaatgtttatatcatggccgataagcagaagaatgggatcaaagtcaatttcaagatcagacataatatcgaagatggctccgtccagctcgccgaccactaccagcagaacacccctattggcgatggacctgttttgttgcccgacaatcactaccttagtacccaaagcgctctatcgaaggatccgaacgagaagagagatcatatggttctgttggaattcgtgaccgctgcgggtattacgctagggatggacgagctatataagaggtcccgcgacattagccatggttttccgccagcggtcgccgcgcaggacgatggcaccttacctatgtcgtgtgctcaggaaagtggcatggatcgccatcctgctgcttgtgccagtgctagaatcaatgtgtga

SEQ ID NO: 848 - DNA, 855 bp, Artificial Sequence
  Modified Open Reading Frame
atggtatcaaaaggagaagagttatttacaggtgttgtacctattctagttgagttggacggagatgtcaacggtcataagttttcagtctctggagagggagaaggtgacgcaacgtatggcaagctaactttaaagttcatctgtactactggtaagctgcccgttccatggccgacgctcgttactacacttacctatggggtacagtgcttttcaagatatcctgatcacatgaagcagcacgatttcttcaaaagcgctatgcccgaggggtatgtgcaggaacgaacgatcttctttaaggacgacggcaactacaagacacgtgccgaggtaaagttcgagggcgatacgttggtcaaccgtatcgagctcaagggaatagactttaaggaggatggcaacatccttggacacaagctagaatacaattacaactcacacaatgtttatatcatggccgataagcagaagaatgggatcaaagtcaatttcaagatcagacataatatcgaagatggctccgtccagctcgccgaccactaccagcagaacacccctattggcgatggacctgttttgttgcccgacaatcactacctgagtacccaaagcgctctatcgaaagatccgaacgagaagagagatcatatggttctgttggagttcgtgaccgctgcgggtattacgctagggatggacgagctatataagaggtcccgcgacattagccatggttttccgccagcggtcgccgcgcaggacgatggcaccttacctatgtcgtgtgctcaggaaagtggcatggatcgccatcctgctgcttgtgccagtgctagaatcaatgtgtga

SEQ ID NO: 849 - DNA, 855 bp, Artificial Sequence
  Modified Open Reading Frame
atggtatcaaaaggagaagagttatttacaggtgttgtacctattctagttgagttggacggagatgtcaacggtcataagttttcagtctctggagagggagaaggtgacgcaacgtatggcaagctaactttaaaattcatctgtactactggtaagctgcccgttccatggccgacgctcgttactacacttacctatggggtacagtgcttttcaagatatcctgatcacatgaagcagcacgatttcttcaaaagcgctatgcccgaggggtatgtgcaggaacgaacgatcttctttaaggacgacggcaactacaagacacgtgctgaggtaaagttcgagggcgatacgttggtcaaccgtatcgagctcaagggaatagactttaaggaggatggcaatatccttggacataagctagaatacaattacaactcacacaatgtttatatcatggccgataagcagaagaatgggatcaaagtcaatttcaagatcagacataatatcgaagatggctccgtccagctcgccgaccactaccagcagaacacccctattggcgatggacctgttttgttgcccgacaatcattacctcagtacccaaagcgctctatcgaaagatccgaacgagaagagagatcatatggttctgttggagttcgtgaccgctgcgggtattacgctagggatggacgagctatataagaggtcccgcgacattagccatggttttccgccagcggtcgccgcgcaggacgatggcaccttacctatgtcgtgtgctcaggaaagtggcatggatcgccatcctgctgcttgtgccagtgctaggatcaatgtgtga

SEQ ID NO: 850 - DNA, 855 bp, Artificial Sequence
  Modified Open Reading Frame
atggtaagcaagggcgaagagctttttacaggggtggttcctatactggtggaattggacggcgacgtgaacggccacaagttttctgtgagtggtgagggcgaaggcgacgccacatatggcaagctgaccctgaagttcatatgcacgaccgggaagttaccggtgccgtggcccaccctggtcacgacgcttacctacggagtgcagtgcttcagtaggtatccggatcatatgaaacagcatgacttttttaagagtgctatgccagaaggttatgtccaggagcgtaccatcttctttaaggacgatggtaactacaagacgagggccgaggtgaagttcgagggcgacaccttggtcaatcgtattgagttgaagggcatcgactttaaagaagatggtaacatccttggacataagctggagtacaattataacagtcataatgtttacattatggcggataagcagaagaatggcatcaaggtaaacttcaagatccgtcataacattgaggacggtagcgtgcagttggcggatcactaccagcagaacacacccataggagacggtcccgttctgctgcccgacaaccactacctaagcacgcaatcagccctgtcaaaggaccccaacgagaagagggaccatatggtgctgcttgagttcgtcaccgccgccgggatcaccctgggcatggatgagctttataagcgcagccgtgacatcagccacggattcccgccggcggtggccgcgcaggacgacgggacgctgcccatgagctgcgcccaagagagcgggatggacagacaccccgcggcctgtgccagcgcccggataaatgtgtga

SEQ ID NO: 851 - DNA, 855 bp, Artificial Sequence
  Modified Open Reading Frame
atggtatcaaaaggagaagagttatttacaggtgttgtacctattctagttgagttggacggagatgtcaacggtcataagttttcagtctctggagagggagaaggtgacgcaacgtatggcaagctaactttaaaattcatctgtactactggtaagctgcccgttccatggccgacgctcgttactacacttacctatggggtacagtgcttttcaagatatcctgatcacatgaagcagcacgatttcttcaaaagcgctatgcccgaggggtatgtgcaggaacgaacgatcttctttaaggacgacggcaactacaagacacgtgctgaggtaaagttcgagggcgatacgttggtcaaccgtatcgagctcaagggaatagactttaaggaggatggcaatatccttggacataagctagaatacaattacaactcacacaatgtttatatcatggccgataagcagaagaatgggatcaaagtcaatttcaagatcagacataatatcgaagatggctccgtccagctcgccgaccactaccagcagaacacccctattggcgatggacctgttttgttgcccgacaatcactacctcagtacccaaagcgctctatcgaaagatccgaacgagaagagagatcatatggttctgttggagttcgtgaccgctgcgggtattacgctagggatggacgagctatataagaggtcccgcgacattagccatggttttccgccagcggtcgccgcgcaggacgatggcaccttacctatgtcgtgtgctcaggaaagtggcatggatcgccatcctgctgcttgtgccagtgctagaatcaatgtgtga

SEQ ID NO: 852 - DNA, 855 bp, Artificial Sequence
  Modified Open Reading Frame
atggtaagcaagggcgaggagttattcacgggtgtcgttccaatcttggtggagctggacggcgacgtcaacggacacaagtttagtgtgtccggagagggcgagggtgacgcaacgtatggtaagctgaccttgaagttcatctgcactaccggcaaactgcctgtgccgtggcccacgctcgtgacgacgcttacctacggagtacagtgcttcagtaggtaccccgatcacatgaagcagcacgacttctttaagagcgcgatgcccgagggctacgtccaggagcgtaccatcttctttaaggatgatggtaactataagacgcgggccgaggtgaagttcgagggcgacaccttggtcaaccggatcgagctcaagggcatcgattttaaagaggacgggaacatcctgggccacaaattggagtacaactacaacagccataatgtatacattatggctgacaagcagaagaacggtatcaaggtgaacttcaagatccgtcataacattgaggatggttcggtgcagctcgccgatcactaccagcagaacacgcccatcggcgatgggcctgttctgctgccggacaaccattacttgtccacccagagcgccctctccaaggaccctaacgaaaaacgggaccacatggtcctgcttgagttcgtgaccgccgccggcatcaccctgggcatggacgagctatataagaggtcccgtgatatcagccacggctttcctccagccgtggctgcacaagatgacgggacactgcctatgagctgtgcccaggagtcaggaatggatcgacacccggcagcgtgtgcaagcgctagaataaatgtttga

SEQ ID NO: 853 - DNA, 855 bp, Artificial Sequence
  Modified Open Reading Frame
atggtcagcaaaggggaagagctcttcactggggttgtccccatcctcgtcgaactcgacggggatgtgaatgggcataagttttccgtgagtggcgagggcgagggcgacgccacttacggaaaacttacgctcaaattcatatgcaccacgggaaagctcccggtgccgtggccgacgttagtgacaacactgacgtatggcgtccagtgcttcagtcggtatcccgaccatatgaagcagcacgacttttttaagtcggcgatgccagaaggatacgtccaggagcggacgatattcttcaaagacgacggcaactataagactagggccgaagtcaaatttgaaggcgatacccttgtcaataggattgaactcaagggtatcgacttcaaggaggacgggaatattctggggcacaagctcgaatataactataattcccataatgtgtacattatggctgataagcagaagaatggaattaaagttaatttcaagatccgtcacaatattgaggacggatcggtccaactagcggaccactaccaacagaatactcccatcggggacggcccggtcctcctcccggataatcactacttgagtactcaaagtgcattatccaaggatccgaacgaaaagagggaccacatggtccttcttgagttcgtgacggccgcggggataaccctaggtatggatgagctctataagagatccagagatatttctcatggatttcctccggcggtggcggcacaagacgatgggacactcccaatgtcttgtgcgcaggagtctgggatggaccgccacccagctgcctgcgccagcgctcggataaacgtgtag

SEQ ID NO: 854 - DNA, 855 bp, Artificial Sequence
  Modified Open Reading Frame
atggtaagcaagggcgaagagctttttacaggggtggttcctatactggtggaattggacggcgacgtgaacggccacaagttttctgtgagtggtgagggcgaaggcgacgccacatatggcaagctgaccctgaagttcatatgcacgaccggcaagttaccggtgccgtggcccaccctggtcaccaccctgacctacggagtccagtgcttctctcggtatccggatcatatgaaacagcatgacttcttcaagagcgctatgccagaaggttatgtccaggagcgtaccatcttctttaaggacgatggtaactacaaaacgagggccgaggtgaagttcgagggagacaccctggtcaatcgtattgagttgaagggcatcgactttaaagaagatggtaacatccttggacataagctggagtacaactacaacagtcataatgtttacataatggccgataaacagaagaatggcatcaaggtaaactttaaaatccgtcataacattgaagacggcagcgtgcagttggcggaccactaccagcagaacacacccataggagacggtcccgttctgctgcccgacaaccactacctaagcacgcaatcagccctgtcaaaggaccccaacgagaagagggaccatatggtgctgcttgagttcgtcaccgccgccgggatcaccctgggcatggatgagctttataagcgcagccgtgacatcagccacggattcccgccggcggtggccgcgcaggacgacgggacgctgcccatgagctgcgcccaagagagcgggatggacagacaccccgcggcctgtgccagcgcccggataaatgtgtga

SEQ ID NO: 855 - DNA, 855 bp, Artificial Sequence
  Modified Open Reading Frame
atggtgtccaagggcgaagagctttttacaggggtggttcctatactggtggaattggacggcgacgtgaacggccacaagttttctgtgagtggtgagggcgaaggcgacgccacatatggcaagctgaccctgaagttcatatgcacgaccggcaagttaccggtgccgtggcccaccctggtcaccaccctgacctacggagtccagtgcttctctcggtatccggatcatatgaaacagcatgacttcttcaagagcgctatgccagaaggttacgtccaggagcgtaccatcttctttaaggacgatggtaactacaaaacgagggccgaggtgaagttcgagggagacaccctggtcaatcgtattgagttgaagggcatcgactttaaagaagatggtaacatccttggacataagctggagtacaactacaacagtcataatgtttacataatggccgataaacagaagaatggcatcaaggtaaactttaaaatccgtcataacattgaagacggcagcgtgcagttggcggaccactaccagcagaacacacccataggagacggtcccgttctgctgcccgacaaccactacctaagcacgcaatcagccctgtcaaaggaccccaacgagaagagggaccatatggtgctgcttgagttcgtcaccgccgccgggatcaccctgggcatggatgagctttataagcgcagccgtgacatcagccacggattcccgccggcggtggccgcgcaggacgacgggacgctgcccatgagctgcgcccaagagagcgggatggacagacaccccgcggcctgtgccagcgcccggatcaacgtgtga

SEQ ID NO: 856 - DNA, 855 bp, Artificial Sequence
  Modified Open Reading Frame
atggtgtccaagggcgaagagctttttacaggggtggttcctatactggtggaattggacggcgacgtgaacggccacaagttttctgtgagtggtgagggcgaaggcgacgccacatatggcaagctgaccctgaagttcatatgcacgaccggcaagttaccggtgccgtggcccaccctggtcaccaccctgacctacggagtccagtgcttctctcggtatccggatcatatgaaacagcatgacttcttcaagagcgctatgccagaaggttatgtccaggagcgtaccatcttctttaaggacgatggtaactacaaaacgagggccgaggtgaagttcgagggagacaccctggtcaatcgtattgagttgaagggcatcgactttaaagaagatggtaacatccttggacataagctggagtacaactacaacagtcataatgtttacataatggccgataaacagaagaatggcatcaaggtaaactttaaaatccgtcataacattgaagacggcagcgtgcagttggcggaccactaccagcagaacacacccataggagacggtcccgttctgctgcccgacaaccactacctaagcacgcaatcagccctgtcaaaggaccccaacgagaagagggaccatatggtgctgcttgagttcgtcaccgccgccgggatcaccctgggcatggatgagctttataagcgcagccgtgacatcagccacggattcccgccggcggtggccgcgcaggacgacgggacgctgcccatgagctgcgcccaagagagcgggatggacagacaccccgcggcctgtgccagcgcccggatcaacgtgtga

SEQ ID NO: 857 - DNA, 855 bp, Artificial Sequence
  Modified Open Reading Frame
atggtgtccaagggcgaagagctttttacaggggtggttcctatactggtggaattggacggcgacgtgaacggccacaagttttctgtgagtggtgagggcgaaggcgacgccacatatggcaagctgaccctgaagttcatatgcacgacgggcaagttaccggtgccgtggcccaccctggtcaccaccctgacctacggagtccagtgcttctctcggtatccggatcatatgaaacagcatgacttcttcaagagcgctatgccagaaggttatgtccaggagcgtaccatcttctttaaggacgatggtaactacaaaacgagggccgaggtgaagttcgaaggagacaccctggtcaatcgtattgagttgaagggcatcgactttaaagaagatggtaacatccttggacataagctggagtacaactacaacagtcataatgtttacataatggccgataaacagaagaatggcatcaaggtaaactttaaaatccgtcataacattgaagacggcagcgtgcagttggcggaccactaccagcagaacacacccataggagacggtcccgttctgctgcccgacaaccactacctaagcacgcaatcagccctgtcaaaggaccccaacgagaagagggaccatatggtgctgcttgagttcgtcaccgccgccgggatcaccctgggcatggatgagctttataagcgcagccgtgacatcagccacggattcccgccggcggtggccgcgcaggacgacgggacgctgcccatgagctgcgcccaagagagcgggatggacagacaccccgcggcctgtgccagcgcccggatcaacgtgtga

SEQ ID NO: 858 - DNA, 855 bp, Artificial Sequence
  Modified Open Reading Frame
atggtgtccaagggcgaagagctttttacaggggtggttcctatactggtggaattggacggcgacgtgaacggccacaagttttctgtgagtggtgagggcgaaggcgacgccacatatggcaagctgaccctgaagttcatatgcacgacgggcaagttaccggtgccgtggcccaccctggtcaccaccctgacctacggagtccagtgcttctctcggtatccggatcatatgaaacagcatgacttcttcaagagcgctatgccagaaggttatgtccaggagcgtaccatcttctttaaggacgatggtaactacaaaacgagggccgaggtgaagttcgaaggagacaccctggtcaatcgtattgagttgaagggcatcgactttaaagaagatggtaacatccttggacataagctggagtacaactacaacagtcataatgtttacataatggccgataaacagaagaatggcatcaaggtaaactttaaaatccgtcataacattgaagacggcagcgtgcagttggcggaccactaccagcagaacacacccataggagacggtcccgttctgctgcccgacaaccactacctaagcacgcaatcagccctgtcaaaggaccccaacgagaagagggaccatatggtgctgcttgagttcgtcaccgccgccgggatcaccctgggcatggatgagctttataagcgcagccgtgacatcagccacggattcccgccggcggtggccgcgcaggacgacgggacgctgcccatgagctgtgcccaagagagcgggatggacagacatcccgcggcctgtgccagcgcccgtatcaacgtgtga

SEQ ID NO: 859 - DNA, 855 bp, Artificial Sequence
  Modified Open Reading Frame
atggtgtccaagggcgaagagctttttacaggggtggttcctatactggtggaattggacggcgacgtgaacggccacaagttttctgtgagtggtgagggcgaaggcgacgccacatatggcaagctgaccctgaagttcatatgcacgacgggcaagttaccggtgccgtggcccaccctggtcaccaccctgacctacggagtccagtgcttctctcggtatccggatcatatgaaacagcatgacttcttcaagagcgctatgccagaaggttatgtccaggagcgtaccatcttctttaaggacgatggtaactacaaaacgagggccgaggtgaagttcgaaggagacaccctggtcaatcgtattgagttgaagggcatcgactttaaagaagatggtaacatccttggacataagctggagtacaactacaacagtcataatgtttacataatggccgataaacagaagaatggcatcaaggtaaactttaaaatccgtcataacattgaagacggcagcgtgcagttggcggaccactaccagcagaacacacccataggagacggtcccgttctgctgcccgacaaccactacctaagcacgcaatcagccctgtcaaaggaccccaacgagaagagggaccatatggtgctgcttgagttcgtcaccgccgccgggatcaccctgggcatggatgagctttataagcgcagccgtgacatcagccacggattcccgccggcggtggccgcgcaggacgacgggacgctgcccatgagctgtgcccaagagagcgggatggacagacatcccgcggcctgtgcctctgcgcgtataaacgtgtag

SEQ ID NO: 860 - DNA, 855 bp, Artificial Sequence
  Modified Open Reading Frame
atggtttctaaaggtgaggagctgttcaccggtgtggtgcctattctggtggagctggacggcgacgtgaacggacacaagttctcggtgagtggcgaaggtgaaggcgacgccacgtacgggaagcttaccctgaaattcatctgtaccacgggtaagcttcctgtaccgtggccgaccttggtgaccactctgacttatggcgtgcagtgcttcagtcggtaccccgaccacatgaagcagcacgacttcttcaagtcggccatgcctgaaggatatgtccaggaaaggaccatattcttcaaggatgacggcaattataagacgcgtgcggaagtcaagtttgaaggcgatacccttgtcaatagaattgagctcaagggtatcgacttcaaagaggacggtaatatactcgggcacaagctcgagtataattacaattcccacaacgtctatataatggccgacaagcagaagaatggcatcaaggtcaacttcaagattcgccacaacatcgaggacgggtccgttcagctcgccgaccactaccagcagaatacacccatcggtgacggccctgtattgttgcccgacaatcattacctgagcacgcaatcagcgctgtcgaaggacccgaatgagaagcgcgaccatatggttcttctagagttcgtcactgccgcagggatcaccctcggcatggacgagctctacaagcgtagtcgcgacatctcacacgggttcccgccagcggtggccgcgcaagatgatgggacgttgcctatgagctgcgcgcaggagtccggcatggatagacatcctgccgcctgcgccagcgctaggatcaacgtctaa

SEQ ID NO: 861 - DNA, 855 bp, Artificial Sequence
  Modified Open Reading Frame
atggtgtccaagggcgaagagctttttacaggggtggttcctatactggtggaattggacggcgacgtgaacggccacaagttttctgtgagtggtgagggcgaaggcgacgccacatatggcaagctgaccctgaagttcatatgcacgacgggcaagttaccggtgccgtggcccaccctggtcaccaccctgacctacggagtccagtgcttctctcggtatccggatcatatgaaacagcatgacttcttcaagagtgctatgccagaaggttatgtccaggagcgtaccatcttctttaaagacgatggtaactacaaaacgagggccgaggtgaagttcgaaggagacaccctggtcaatcgtattgagttgaagggcatcgactttaaagaagatggtaacatccttggacataagcttgagtacaactataacagtcataatgtttacataatggccgataaacagaagaatggcatcaaggtaaactttaaaatccgtcataacattgaagacggcagcgtgcagttggcggaccactaccagcagaacacacccataggagacggtcccgttctgctgcccgacaaccactacctaagcacgcaatcagccctgtcaaaggaccccaacgagaagagggaccatatggtgctgcttgagttcgtcaccgccgccgggatcaccctgggcatggatgagctttataagcgcagccgtgacatcagccacggattcccgccggcggtggccgcgcaggacgacgggacgctgcccatgagctgtgcccaagagagcgggatggacagacatcccgcggcctgtgcctctgcgcgtataaacgtgtag

SEQ ID NO: 862 - DNA, 855 bp, Artificial Sequence
  Modified Open Reading Frame
atggtatctaagggcgaagagctgtttacgggcgtcgtccccatcctcgtcgagctagacggagacgtgaacggtcacaagttctccgtctccggtgagggtgagggcgatgccacgtacggcaagctcacattgaagttcatatgtacaacgggcaagctgcccgtgccatggcccaccctcgtaactaccctcacgtacggtgttcagtgtttctcgcgctacccggaccatatgaagcagcacgactttttcaagtccgcgatgcccgagggctacgtccaggagcgcaccatcttcttcaaagacgatggaaactacaagacacgtgcggaggtgaagttcgagggcgacacccttgtcaaccgaatcgagctgaaaggcattgacttcaaggaggatggcaatatcctgggccataagctggagtacaactacaactcccacaacgtctatattatggcggataagcagaagaatggcattaaggtcaacttcaagatccgccataatatagaggacgggtccgtccagttggcggaccactaccagcagaacacccccatcggcgacggacccgtcctcctgccggataatcactacttgtccacgcagtccgcgctctcaaaggaccccaatgagaagcgcgatcacatggtcctgctggagttcgtcactgccgcggggataaccctcggcatggacgaactctacaagcgctcgcgcgacatctcccacgggtttccacccgcagtcgcggcgcaggacgatgggacactccccatgtcctgcgcgcaggagtccggcatggatagacatcctgccgcttgcgcgagcgccaggatcaacgtgtga

SEQ ID NO: 863 - DNA, 855 bp, Artificial Sequence
  Modified Open Reading Frame
atggtatctaagggcgaagagctgtttacgggcgtcgtccccatcctcgtcgagctagacggagacgtgaacggtcacaagttctccgtctccggtgagggtgagggcgacgccacgtacggcaagctcacattgaagttcatatgtacaacgggcaagctgcccgtgccatggcccaccctcgtaactaccctcacgtacggtgtccagtgtttctcgcgctacccggaccatatgaagcagcacgacttcttcaagtccgcgatgcccgagggctacgtccaggagcgcaccatcttcttcaaagacgatggaaactacaagacacgtgcggaggtgaagttcgagggcgacacccttgtcaaccgaatcgagctgaaaggcatcgacttcaaggaggatggcaacatcctgggccataagctggagtacaactacaactcccacaacgtctatattatggcggataagcagaagaatggcattaaggtcaacttcaagatccgccataatatagaggacgggtccgtccagctggcggaccactaccagcagaacacccccatcggcgacggacccgtcctcctgccggacaatcactacttgtccacgcagtccgcgctctcaaaggaccccaatgagaagcgcgatcacatggtcctgctggagttcgtcactgccgcggggataaccctcggcatggacgaactctacaagcgctcgcgcgacatctcccacgggtttccacccgcagtcgcggcgcaggacgatgggacactccccatgtcctgcgcgcaggagtccggcatggatagacatcctgccgcttgcgcgagcgccaggatcaacgtgtga

SEQ ID NO: 864 - DNA, 855 bp, Artificial Sequence
  Modified Open Reading Frame
atggtatctaaaggcgaggagctgtttacgggcgtcgtccccatcctcgtcgagctagacggagacgtgaacggtcacaagttctccgtctccggtgagggtgagggcgacgccacgtacggcaagctcacattgaagttcatatgtacaacgggcaagctgcccgtgccatggcccaccctcgtaactaccctcacgtacggtgtccagtgtttctcgcgctacccggaccatatgaagcagcacgacttcttcaagtccgcgatgcccgagggctacgtccaggagcgcaccatcttcttcaaagacgatggaaactacaagacacgtgcggaggtgaagttcgagggcgacacccttgtcaaccgaatcgagctgaaaggcatcgacttcaaggaggatggcaacatcctgggccataagctggagtacaactacaactcccacaacgtctatattatggcggataagcagaagaatggcattaaggtcaacttcaagatccgccataatatagaggacgggtccgtccagctggcggaccactaccagcagaacacccccatcggcgacggacccgtcctcctgccggacaatcactacttgtccacgcagtccgcgctctcaaaggaccccaatgagaagcgcgatcacatggtcctgctggagttcgtcactgccgcggggataaccctcggcatggacgaactctacaagcgctcgcgcgacatctcccacgggtttccacccgcagtcgcggcgcaggacgatgggacactccccatgtcctgcgcgcaggagtccggcatggatagacatcctgccgcttgcgcgagcgccaggatcaacgtgtga

SEQ ID NO: 865 - DNA, 855 bp, Artificial Sequence
  Modified Open Reading Frame
atggtatctaagggcgaggagctgtttacgggcgtcgtccccatcctcgtcgagctagacggagacgtgaacggtcacaagttctccgtctccggtgagggtgagggcgacgccacgtacggcaagctcacattgaagttcatatgtacaacgggcaagctgcccgtgccatggcccaccctcgtaactaccctcacgtacggtgtccagtgtttctcgcgctacccggaccatatgaagcagcacgacttcttcaagtccgcgatgcccgagggctacgtccaggagcgcaccatcttcttcaaagacgatggaaactacaagacacgtgcggaggtgaagttcgagggcgacacccttgtcaaccgaatcgagctgaaaggcatcgacttcaaggaggatggcaacatcctgggccacaagctggagtacaactacaactcccacaacgtctatattatggcggataagcagaagaatggcattaaggtcaacttcaagatccgccataatatagaggacgggtccgtccagctggcggaccactaccagcagaacacccccatcggcgacggacccgtcctcctgccggacaatcactacttgtccacgcagtccgcgctctcaaaggaccccaatgagaagcgcgatcacatggtcctgctggagttcgtcactgccgcggggataaccctcggcatggacgaactctacaagcgctcgcgcgacatctcccacgggtttccacccgcagtcgcggcgcaggacgatgggacactccccatgtcctgcgcgcaggagtccggcatggatagacatcctgccgcttgcgcgagcgccaggatcaacgtgtga

SEQ ID NO: 866 - DNA, 855 bp, Artificial Sequence
  Modified Open Reading Frame
atggtatctaagggcgaggagctgtttacgggcgtcgtccccatcctcgtcgagctagacggagacgtgaacggtcacaagttctccgtctccggtgagggtgagggcgacgccacgtacggcaagctcacattgaagttcatatgtacaacgggcaagctgcccgtgccatggcccaccctcgtaactaccctcacgtacggtgtccagtgtttctcgcgctacccggaccatatgaagcagcacgacttcttcaagtccgcgatgcccgagggctacgtccaggagcgcaccatcttcttcaaagacgatggaaactacaagacacgtgcggaggtgaagttcgagggcgacacccttgtcaaccgaatcgagctgaaaggcatcgacttcaaggaggatggcaacatcctgggccataaactggagtacaactacaactcccacaacgtctatattatggcggataagcagaagaatggcattaaggtcaacttcaagatccgccataatatagaggacgggtccgtccagctggcggaccactaccagcagaacacccccatcggcgacggacccgtcctcctgccggacaatcactacttgtccacgcagtccgcgctctcaaaggaccccaatgagaagcgcgatcacatggtcctgctggagttcgtcactgccgcggggataaccctcggcatggacgaactctacaagcgctcgcgcgacatctcccacgggtttccacccgcagtcgcggcgcaggacgatgggacactccccatgtcctgcgcgcaggagtccggcatggatagacatcctgccgcttgcgcgagcgccaggatcaacgtgtga

SEQ ID NO: 867 - DNA, 855 bp, Artificial Sequence
  Modified Open Reading Frame
atggtatctaagggcgaggagctgtttacgggcgtcgtccccatcctcgtcgagctagacggagacgtgaacggtcacaagttctccgtctccggtgagggtgagggcgacgccacgtacggcaagctcacattgaagttcatatgtacaacgggcaagctgcccgtgccatggcccaccctcgtaactaccctcacgtacggtgtccagtgtttctcgcgctacccggaccatatgaagcagcacgacttcttcaagtccgcgatgcccgagggctacgtccaggagcgcaccatcttcttcaaagacgatggaaactacaagacacgtgcggaggtgaagttcgagggcgacacccttgtcaaccgaatcgagctgaaaggcatcgacttcaaggaggatggcaacatcctgggccataagctggagtacaactacaactcccacaacgtgtatattatggcggataagcagaagaatggcattaaggtcaacttcaagatccgccataatatagaggacgggtccgtccagctggcggaccactaccagcagaacacccccatcggcgacggacccgtcctcctgccggacaatcactacttgtccacgcagtccgcgctctcaaaggaccccaatgagaagcgcgatcacatggtcctgctggagttcgtcactgccgcggggataaccctcggcatggacgaactctacaagcgctcgcgcgacatctcccacgggtttccacccgcagtcgcggcgcaggacgatgggacactccccatgtcctgcgcgcaggagtccggcatggatagacatcctgccgcttgcgcgagcgccaggatcaacgtgtga

SEQ ID NO: 868 - DNA, 855 bp, Artificial Sequence
  Modified Open Reading Frame
atggtatctaagggcgaggagctgtttacgggcgtcgtccccatcctcgtcgagctagacggagacgtgaacggtcacaagttctccgtctccggtgagggtgagggcgacgccacgtacggcaagctcacattgaagttcatatgtacaacgggcaagctgcccgtgccatggcccaccctcgtaactaccctcacgtacggtgtccagtgtttctcgcgctacccggaccatatgaagcagcacgacttcttcaagtccgcgatgcccgagggctacgtccaggagcgcaccatcttcttcaaagacgatggaaactacaagacacgtgcggaggtgaagttcgagggcgacacccttgtcaaccgaatcgagctgaaaggcatcgacttcaaggaggatggcaacatcctgggccataagctggagtacaactacaactcccacaacgtctatattatggcggataagcagaagaatggcattaaggtcaacttcaagatccgccataatatcgaggacgggtccgtccagctggcggaccactaccagcagaacacccccatcggcgacggacccgtcctcctgccggacaatcactacttgtccacgcagtccgcgctctcaaaggaccccaatgagaagcgcgatcacatggtcctgctggagttcgtcactgccgcggggataaccctcggcatggacgaactctacaagcgctcgcgcgacatctcccacgggtttccacccgcagtcgcggcgcaggacgatgggacactccccatgtcctgcgcgcaggagtccggcatggatagacatcctgccgcttgcgcgagcgccaggatcaacgtgtga

SEQ ID NO: 869 - DNA, 855 bp, Artificial Sequence
  Modified Open Reading Frame
atggtatctaagggcgaggagctgtttacgggcgtcgtccccatcctcgtcgagctagacggagacgtgaacggtcacaagttctccgtctccggtgagggtgagggcgacgccacgtacggcaagctcacattgaagttcatatgtacaacgggcaagctgcccgtgccatggcccaccctcgtaactaccctcacgtacggtgtccagtgtttctcgcgctacccggaccatatgaagcagcacgacttcttcaagtccgcgatgcccgagggctacgtccaggagcgcaccatcttcttcaaagacgatggaaactacaagacacgtgcggaggtgaagttcgagggcgacacccttgtcaaccgaatcgagctgaaaggcatcgacttcaaggaggatggcaacatcctgggccataagctggagtacaactacaactcccacaacgtctatattatggcggataagcagaagaatggcattaaggtcaacttcaagatccgccataatatagaggacgggtccgtccagctggcggaccactaccagcagaacacccccatcggcgacggacccgtcctcctgccggacaatcactacttgtccactcagtccgcgctctcaaaggaccccaatgagaagcgcgatcacatggtcctgctggagttcgtcactgccgcggggataaccctcggcatggacgaactctacaagcgctcgcgcgacatctcccacgggtttccacccgcagtcgcggcgcaggacgatgggacactccccatgtcctgcgcgcaggagtccggcatggatagacatcctgccgcttgcgcgagcgccaggatcaacgtgtga

SEQ ID NO: 870 - DNA, 855 bp, Artificial Sequence
  Modified Open Reading Frame
atggtttctaagggtgaggagctgttcaccggtgtggtgcctattctggtggagctggacggcgacgtgaacggacacaagttctcggtgagtggcgaaggtgaaggcgacgccacgtacgggaagcttaccctgaaattcatctgtaccacgggtaagcttcctgtaccgtggccgaccttggtgaccactctgacttatggcgtgcagtgcttcagtcggtaccccgaccacatgaagcagcacgacttcttcaagtcggccatgcctgaaggatatgtccaggaaaggaccatattcttcaaggatgacggcaattataagacgcgtgcggaagtcaagtttgaaggcgatacccttgtcaatagaattgagctcaagggtatcgacttcaaagaggacggtaatatactcgggcacaagctcgagtataattacaattcccacaacgtctatataatggccgacaagcagaagaatggcatcaaggtcaacttcaagattcgccacaacatcgaggacgggtccgttcagctcgccgaccactaccagcagaatacacccatcggtgacggccctgtattgttgcccgacaatcattaccttagcacgcagtcagcgctgtcgaaggacccgaatgagaagcgcgaccatatggttcttctagagttcgtcactgccgcagggatcaccctcggcatggacgagctctacaagcgtagtcgcgacatctcacacgggttcccgccagcggtggctgcgcaagatgatgggacgttgcctatgagctgcgcgcaggagtccggcatggatagacatcctgccgcctgcgccagcgctaggatcaacgtctaa

SEQ ID NO: 871 - DNA, 855 bp, Artificial Sequence
  Modified Open Reading Frame
atggtatcaaagggagaagagcttttcacaggcgtcgtccccatattggtggagctggacggcgacgtgaacggccacaagttcagcgtgtccggggagggcgagggtgatgccacctatggcaaactgaccttgaagttcatctgcactaccgggaagctccccgtgccctggcccaccctcgtgactacactgacatacggggtccagtgcttcagtaggtaccccgaccacatgaagcagcacgacttcttcaagtcggccatgccggagggctacgtccaggagaggaccatcttctttaaggacgacggtaactataagacgagagccgaggttaagttcgagggtgacaccctcgtgaacagaatcgagctgaagggcatcgacttcaaagaggatggcaacatcctgggccacaagctggagtacaactacaacagccacaacgtctacatcatggccgacaagcagaagaacggtatcaaggtgaacttcaagatcagacacaatatagaggacggcagcgtgcagctcgccgaccactatcagcagaacacgcccatcggcgatgggcctgttctgctgccagataaccattatctgagcacccagagcgccctctccaaggaccctaacgagaagagggaccacatggtcctactcgagttcgttaccgccgccggcatcaccttggggatggacgaactgtacaagaggtcccgcgacataagccacggctttcctccagccgtggctgcacaggacgacgggaccctgcccatgagctgtgctcaagagtccggcatggacaggcatcccgccgcctgtgcgagcgcgaggatcaacgtgtaa

SEQ ID NO: 872 - DNA, 855 bp, Artificial Sequence
  Modified Open Reading Frame
atggtatcaaagggagaagagcttttcacaggcgtcgtccccatattggtggagctggacggcgacgtgaacggccacaagttcagcgtgtccggggagggcgagggtgatgccacctatggcaaactgaccttgaagttcatctgcactaccgggaagctccccgtgccctggcccaccctcgtgactacactgacatacggggtccagtgcttcagtcggtaccccgaccacatgaagcagcacgacttcttcaagtcggccatgccggagggctacgtccaggagaggaccatcttctttaaggacgacggtaactataagacgagagccgaggttaagttcgagggtgacaccctcgtgaacagaatcgagctgaagggcatcgacttcaaagaggatggcaacatcctgggccacaagctggagtacaactacaacagccacaacgtctacatcatggccgacaagcagaagaacggtatcaaggtgaacttcaagatcagacacaatatagaggacggcagcgtgcagctcgccgaccactatcagcagaacacgcccatcggcgatgggcctgttctgctgccagataaccattatctgagcacccagagcgccctctccaaggaccctaacgagaagagggaccacatggtcctactcgagttcgttaccgccgccggcatcaccttggggatggacgaactgtacaagaggtcccgcgacataagccacggctttcctccagccgtggctgcacaggacgacgggaccctgcccatgagctgtgctcaagagtccggcatggacaggcatcccgccgcctgtgcgagcgcgaggatcaacgtgtaa

SEQ ID NO: 873 - DNA, 855 bp, Artificial Sequence
  Modified Open Reading Frame
atggtatcaaagggagaagagcttttcacaggcgtcgtccccatattggtggagctggacggcgacgtgaacggccacaagttcagcgtgtccggggagggcgagggtgatgccacctatggcaaactgaccttgaagttcatctgcactaccgggaagctccccgtgccctggcccaccctcgtgactacactgacatacggggtccagtgcttcagtaggtaccccgaccacatgaagcagcacgacttcttcaagtcggccatgccggagggctacgtccaggagaggaccatcttctttaaggacgacggtaactataagacgagagccgaggttaagttcgagggtgacaccctcgtgaacagaatcgagctgaagggcatcgacttcaaagaggatggcaacatcctgggccacaagctggagtacaactacaacagccacaacgtctacatcatggccgacaagcagaagaacggtatcaaggtgaacttcaagatcagacacaatatagaggacggcagcgtgcagctcgccgaccactatcagcagaacacgcccatcggcgatgggcctgttctgctgccagataaccattatctgagcacccagagcgccctctccaaggaccctaacgagaagagggaccacatggtcctactcgagttcgttaccgccgccggcatcaccttggggatggacgaactgtacaagaggtcccgcgacataagccacggctttcctccagccgtggctgcacaggacgacgggaccctgcccatgagctgtgctcaggagtccggcatggacaggcatcccgccgcctgtgcgagcgcgaggatcaacgtgtaa

SEQ ID NO: 874 - DNA, 855 bp, Artificial Sequence
  Modified Open Reading Frame
atggtatcaaagggagaagagcttttcacaggcgtcgtccccatattggtggagctggacggcgacgtgaacggccacaagttcagcgtgtccggggagggcgagggtgacgccacctatggcaaactgaccttgaagttcatctgcactaccgggaagctccccgtgccctggcccaccctcgtgactacactgacatacggggtccagtgcttcagtaggtaccccgaccacatgaagcagcacgacttcttcaagtcggccatgccggagggctacgtccaggagaggaccatcttctttaaggacgacggtaactataagacgagagccgaggttaagttcgagggtgacaccctcgtgaacagaatcgagctgaagggcatcgacttcaaagaggatggcaacatcctgggccacaagctggagtacaactacaacagccacaacgtctacatcatggccgacaagcagaagaacggtatcaaggtgaacttcaagatcagacacaatatagaggacggcagcgtgcagctcgccgaccactatcagcagaacacgcccatcggcgatgggcctgttctgctgccagataaccattatctgagcacccagagcgccctctccaaggaccctaacgagaagagggaccacatggtcctactcgagttcgttaccgccgccggcatcaccttggggatggacgaactgtacaagaggtcccgcgacataagccacggctttcctccagccgtggctgcacaggacgacgggaccctgcccatgagctgtgctcaggagtccggcatggacaggcatcccgccgcctgtgcgagcgcgaggatcaacgtgtaa

SEQ ID NO: 875 - DNA, 855 bp, Artificial Sequence
  Modified Open Reading Frame
atggttagtaagggcgaggagctctttacaggcgtcgtgcctatactggtggagctggacggcgacgtgaacggccacaagtttagcgtgtccggagagggcgaaggcgacgccacctacggcaagctgaccctgaagttcatctgcaccaccggcaaactgcccgtgccctggcccaccctcgtgaccaccctgacctacggagtccagtgcttcagcagataccccgaccacatgaagcagcacgacttcttcaagtccgccatgcccgagggctacgtgcaggagcgtaccatcttctttaaggacgatggtaactataagaccagagccgaggtgaagttcgagggagacaccctggtgaacagaatcgagctgaagggcatcgacttcaaagaggacggcaacatcctgggccacaaactggagtacaactacaacagccacaacgtgtacatcatggccgacaaacagaagaacgggatcaaggtgaactttaagatccgtcacaacatcgaggacggcagcgtgcagctcgccgatcactatcagcagaacacgccgatcggcgacggccccgtgctgctgcccgacaaccattacctgagcactcagagcgccctctccaaggaccctaacgagaagagagatcacatggtgctgctcgagttcgttaccgccgccggcatcaccttgggcatggacgagctgtacaagcgttcccgagacatcagccacggctttccaccagccgtggccgcccaagacgacgggaccctgcccatgagctgcgcacaggagtccggcatggacagacaccctgccgcctgtgccagcgccaggatcaacgtgtaa

SEQ ID NO: 876 - DNA, 855 bp, Artificial Sequence
  Modified Open Reading Frame
atggtgtccaaaggcgaagagctgtttaccggcgttgtacctatcctggtggagctggacggcgacgtgaacggtcataaatttagcgtgtccggtgagggggaaggcgacgccacctatggcaagctcacgctgaaattcatctgtaccaccggcaaattgcccgttccttggcccaccctcgtgaccaccctgacctacggggttcagtgtttcagtagatatcctgaccacatgaaacaacacgacttcttcaagtccgccatgcccgaaggttacgtgcaagaaagaaccatcttttttaaggacgacggaaactacaagaccagagccgaggtgaagtttgagggagacaccctggtgaacagaatcgagctgaagggcatcgacttcaaagaagacggcaacatcttgggccacaaactggagtacaactataacagccacaacgtgtacatcatggccgacaaacagaaaaacgggatcaaggtgaactttaagatcagacataacattgaagacggcagcgtgcagctcgcggaccactatcagcagaacacacccatcggcgacggacccgtgctgttgcccgacaaccattacctgagcacgcagagcgccctttccaaggatcctaatgaaaagagagatcacatggtgttgcttgagtttgtgaccgccgctggcattaccctgggtatggacgagctgtacaaaagatcccgtgacatcagccacggctttcctcccgcagtggcagcccaagacgatgggaccctgccaatgagttgtgcccaggagtccggtatggatagacacccagctgcctgtgccagcgctaggattaacgtgtaa

SEQ ID NO: 877 - DNA, 855 bp, Artificial Sequence
  Modified Open Reading Frame
atggtgtccaaaggcgaagagctgtttaccggcgttgtacctatcctggtggagctggacggcgacgtgaacggtcataaatttagcgtgtccggtgagggggaaggcgacgccacctatggcaagctcacgctgaaattcatctgtaccaccggcaaattgcccgttccttggcccaccctcgtgaccaccctgacctacggggttcagtgtttcagcagatatcccgaccacatgaaacaacacgacttcttcaagtccgccatgcccgaaggttacgtgcaagaaagaaccatcttttttaaggacgacggaaactacaagaccagagccgaggtgaagtttgagggagacaccctggtgaacagaatcgagctgaagggcatcgacttcaaagaagacggcaacatcttgggccacaaactggagtacaactataacagccacaacgtgtacatcatggccgacaaacagaaaaacgggatcaaggtgaactttaagatcagacataacattgaagacggcagcgtgcagctcgcggaccactatcagcagaacacacccatcggcgacggacccgtgctgttgcccgacaaccattacctgagcacgcagagcgccctttccaaggatcctaatgaaaagagagatcacatggtgttgcttgagtttgtgaccgccgctggcattaccctgggtatggacgagctgtacaaaagatcccgtgacatcagccacggctttcctcccgcagtggcagcccaagacgatgggaccctgccaatgagttgtgcccaggagtccggtatggatagacacccagctgcctgtgccagcgctaggattaacgtgtaa

SEQ ID NO: 878 - DNA, 855 bp, Artificial Sequence
  Modified Open Reading Frame
atggtgtccaaaggcgaagagctgtttaccggcgttgtacctatcctggtggagctggacggcgacgtgaacggtcataaatttagcgtgtccggtgagggggaaggcgacgccacctatggcaagctcacgctgaaattcatctgtaccaccggcaaattgcccgttccttggcccaccctcgtgaccaccctgacctacggggttcagtgcttcagcagataccccgaccacatgaagcaacacgacttcttcaagtccgccatgcccgaaggttacgtgcaagaaagaaccatcttttttaaggacgacggaaactacaagaccagagccgaggtgaagtttgagggagacaccctggtgaacagaatcgagctgaagggcatcgacttcaaagaagacggcaacatcttgggccacaaactggagtacaactataacagccacaacgtgtacatcatggccgacaaacagaaaaacgggatcaaggtgaactttaagatcagacataacattgaagacggcagcgtgcagctcgcggaccactatcagcagaacacacccatcggcgacggacccgtgctgttgcccgacaaccattacctgagcacgcagagcgccctttccaaggatcctaatgaaaagagagatcacatggtgttgcttgagtttgtgaccgccgctggcattaccctgggtatggacgagctgtacaaaagatcccgtgacatcagccacggctttcctcccgcagtggcagcccaagacgatgggaccctgccaatgagttgtgcccaggagtccggtatggatagacacccagctgcctgtgccagcgctaggattaacgtgtaa

SEQ ID NO: 879 - DNA, 855 bp, Artificial Sequence
  Modified Open Reading Frame
atggtgtccaaaggcgaagagctgtttaccggcgttgtacctatcctggtggagctggacggcgacgtgaacggtcataaatttagcgtgtccggcgagggggaaggcgacgccacctatggcaagctcacgctgaaattcatctgtaccaccggcaaattgcccgttccctggcccaccctcgtgaccaccctgacctacggggttcagtgcttcagcagataccccgaccacatgaagcaacacgacttcttcaagtccgccatgcccgaaggttacgtgcaagaaagaaccatcttttttaaggacgacggaaactacaagaccagagccgaggtgaagtttgagggagacaccctggtgaacagaatcgagctgaagggcatcgacttcaaagaagacggcaacatcttgggccacaaactggagtacaactataacagccacaacgtgtacatcatggccgacaaacagaaaaacgggatcaaggtgaactttaagatcagacataacattgaagacggcagcgtgcagctcgcggaccactatcagcagaacacacccatcggcgacggacccgtgctgttgcccgacaaccattacctgagcacgcagagcgccctttccaaggatcctaatgaaaagagagatcacatggtgttgctcgagttcgtgaccgccgctggcattaccctgggtatggacgagctgtacaaaagatcccgtgacatcagccacggctttcctcccgcagtggcagcccaagacgatgggaccctgccaatgagttgtgcccaggagtccggtatggatagacacccagctgcctgtgccagcgctaggattaacgtgtaa

SEQ ID NO: 880 - DNA, 855 bp, Artificial Sequence
  Modified Open Reading Frame
atggtgtccaaaggcgaagagctgtttaccggcgttgtacctatcctggtggagctggacggcgacgtgaacggtcataaatttagcgtgtccggcgagggggaaggcgacgccacctatggcaagctcacgctgaaattcatctgtaccaccggcaaattgcccgttccctggcccaccctcgtgaccaccctgacctacggggttcagtgcttcagcagataccccgaccacatgaagcaacacgacttcttcaagtccgccatgcccgaaggttacgtgcaagaaagaaccatcttttttaaggacgacggaaactacaagaccagagccgaggtgaagtttgagggagacaccctggtgaacagaatcgagctgaagggcatcgacttcaaagaagacggcaacatcttgggccacaaactggagtacaactataacagccacaacgtgtacatcatggccgacaaacagaaaaacgggatcaaggtgaactttaagatcagacataacattgaagacggcagcgtgcagctcgcggaccactatcagcagaacacacccatcggcgacggacccgtgctgttgcccgacaaccattacctgagcacgcagagcgccctttccaaggaccctaatgaaaagagagatcacatggtgttgctcgagttcgtgaccgccgctggcattaccctgggtatggacgagctgtacaaaagatcccgtgacatcagccacggctttcctcccgcagtggcagcccaagacgacgggaccctgccaatgagttgtgcccaggagtccggtatggatagacacccagctgcctgtgccagcgctaggattaacgtgtaa

SEQ ID NO: 881 - DNA, 855 bp, Artificial Sequence
  Modified Open Reading Frame
atggtgtccaaaggcgaagagctgtttaccggcgtggtacctatcctggtggagctggacggcgacgtgaacggtcataaatttagcgtgtccggcgagggggaaggcgacgccacctatggcaagctcacgctgaaattcatctgtaccaccggcaaattgcccgttccctggcccaccctcgtgaccaccctgacctacggggttcagtgcttcagcagataccccgaccacatgaagcaacacgacttcttcaagtccgccatgcccgaaggttacgtgcaagaaagaaccatcttttttaaggacgacggaaactacaagaccagagccgaggtgaagtttgagggagacaccctggtgaacagaatcgagctgaagggcatcgacttcaaagaagacggcaacatcttgggccacaaactggagtacaactataacagccacaacgtgtacatcatggccgacaaacagaaaaacgggatcaaggtgaactttaagatcagacataacattgaagacggcagcgtgcagctcgcggaccactatcagcagaacacacccatcggcgacggacccgtgctgttgcccgacaaccattacctgagcacgcagagcgccctttccaaggaccctaacgaaaagagagatcacatggtgttgctcgagttcgtgaccgccgctggcattaccctgggtatggacgagctgtacaaaagatcccgtgacatcagccacggctttcctcccgcagtggcagcccaagacgacgggaccctgccaatgagttgtgcccaggagtccggtatggatagacacccagctgcctgtgccagcgctaggattaacgtgtaa

SEQ ID NO: 882 - DNA, 855 bp, Artificial Sequence
  Modified Open Reading Frame
atggtgtccaaaggcgaagagctgtttaccggcgtggtacctatcctggtggagctggacggcgacgtgaacggtcataaatttagcgtgtccggcgagggggaaggcgacgccacctatggcaagctcacgctgaaattcatctgtaccaccggcaaattgcccgttccctggcccaccctcgtgaccaccctgacctacggggttcagtgcttcagcagataccccgaccacatgaagcaacacgacttcttcaagtccgccatgcccgaaggttacgtgcaagaaagaaccatcttttttaaggacgacggaaactacaagaccagagccgaggtgaagtttgagggagacaccctggtgaacagaatcgagctgaagggcatcgacttcaaagaagacggcaacatcttgggccacaaactggagtacaactacaacagccacaacgtgtacatcatggccgacaaacagaaaaacgggatcaaggtgaactttaagatcagacataacattgaagacggcagcgtgcagctcgcggaccactatcagcagaacacacccatcggcgacggacccgtgctgttgcccgacaaccattacctgagcacgcagagcgccctttccaaggaccctaacgaaaagagagatcacatggtgttgctcgagttcgtgaccgccgctggcattaccctgggcatggacgagctgtacaaaagatcccgtgacatcagccacggctttcctcccgcagtggcagcccaagacgacgggaccctgccaatgagttgtgcccaggagtccggtatggatagacacccagctgcctgtgccagcgctaggattaacgtgtaa

SEQ ID NO: 883 - DNA, 855 bp, Artificial Sequence
  Modified Open Reading Frame
atggtttcaaaaggagaggagctgttcacaggcgtcgtccccatcctagttgagctggatggggacgtaaacggccataaattcagcgtttccggggagggcgaaggagacgccacctacggaaagctgaccttgaaatttatctgtacgacagggaaactccctgtcccttggccgaccctagtgacgacgctaacatatggcgtccagtgtttcagtcggtatcccgaccacatgaaacagcacgatttttttaaatcggctatgcctgaaggatatgttcaagagcgaacaatattcttcaaagacgacggcaactataagactagggccgaagtcaaattcgagggggataccctcgtcaataggatcgagctcaaggggatagatttcaaggaggatggcaacatccttggccacaagctcgagtataactataacagccataatgtttacattatggctgacaaacagaaaaacggaattaaagtgaactttaagatccgtcataatattgaggatgggagtgttcagttggcagatcactaccaacagaacactcccatcggagacgggccggtgctgctgccagataaccattatctgagcacgcagtcggccctctccaaagatcccaatgaaaagagggatcatatggttttactcgagtttgtaaccgcagcgggcattacgcttggtatggatgagctatacaagcgtagtagggatatcagccatggtttcccgcccgctgtggctgcgcaagacgacggaacccttccgatgtcttgcgcacaagagagcgggatggatcgccatcccgccgcctgtgcatcagctcgtataaatgtctag

SEQ ID NO: 884 - DNA, 855 bp, Artificial Sequence
  Modified Open Reading Frame
atggtgtccaaaggcgaagagctgtttaccggcgtggtacctatcctggtggagctggacggcgacgtgaacggtcataaatttagcgtgtccggcgagggggaaggcgacgccacctatggcaagctcacgctgaaattcatctgtaccaccggcaaattgcccgttccctggcccaccctcgtgaccaccctgacctacggggttcagtgcttcagcagataccccgaccacatgaagcaacacgacttcttcaagtccgccatgcccgaaggctacgtgcaagaaagaaccatcttttttaaggacgacggaaactacaagaccagagccgaggtgaagtttgagggagacaccctggtgaacagaatcgagctgaagggcatcgacttcaaagaggacggcaacatcttgggccacaaactggagtacaactacaacagccacaacgtgtacatcatggccgacaaacagaaaaacgggatcaaggtgaactttaagatcagacataacattgaagacggcagcgtgcagctcgcggaccactatcagcagaacacacccatcggcgacggacccgtgctgttgcccgacaaccattacctgagcacgcagagcgccctttccaaggaccctaacgaaaagagagatcacatggtgttgctcgagttcgtgaccgccgctggcattaccctgggcatggacgagctgtacaaaagatcccgtgacatcagccacggctttcctcccgcagtggcagcccaagacgacgggaccctgccaatgagttgtgcccaggagtccggtatggatagacacccagctgcctgtgccagcgctaggattaacgtgtaa

SEQ ID NO: 885 - DNA, 855 bp, Artificial Sequence
  Modified Open Reading Frame
atggtgtccaaaggcgaagagctgtttaccggcgtggtgcctatcctggtggagctggacggcgacgtgaacggtcataaatttagcgtgtccggcgagggggaaggcgacgccacctatggcaagctcacgctgaaattcatctgtaccaccggcaaattgcccgttccctggcccaccctcgtgaccaccctgacctacggggttcagtgcttcagcagataccccgaccacatgaagcaacacgacttcttcaagtccgccatgcccgaaggctacgtgcaagaaagaaccatcttttttaaggacgacggaaactacaagaccagagccgaggtgaagtttgagggagacaccctggtgaacagaatcgagctgaagggcatcgacttcaaagaggacggcaacatcttgggccacaaactggagtacaactacaacagccacaacgtgtacatcatggccgacaaacagaaaaacgggatcaaggtgaactttaagatcagacataacattgaagacggcagcgtgcagctcgccgaccactatcagcagaacacacccatcggcgacggacccgtgctgttgcccgacaaccattacctgagcacgcagagcgccctttccaaggaccctaacgaaaagagagatcacatggtgttgctcgagttcgtgaccgccgctggcattaccctgggcatggacgagctgtacaaaagatcccgtgacatcagccacggctttcctcccgcagtggcagcccaagacgacgggaccctgccaatgagttgtgcccaggagtccggtatggatagacacccagctgcctgtgccagcgctaggattaacgtgtaa

SEQ ID NO: 886 - DNA, 855 bp, Artificial Sequence
  Modified Open Reading Frame
atggtgtccaaaggcgaagagctgttcaccggcgtggtgcctatcctggtggagctggacggcgacgtgaacggtcataaatttagcgtgtccggcgagggggaaggcgacgccacctatggcaagctcacgctgaaattcatctgtaccaccggcaaattgcccgttccctggcccaccctcgtgaccaccctgacctacggggttcagtgcttcagcagataccccgaccacatgaagcaacacgacttcttcaagtccgccatgcccgaaggctacgtgcaagaaagaaccatcttttttaaggacgacggaaactacaagaccagagccgaggtgaagtttgagggagacaccctggtgaacagaatcgagctgaagggcatcgacttcaaagaggacggcaacatcttgggccacaaactggagtacaactacaacagccacaacgtgtacatcatggccgacaaacagaaaaacgggatcaaggtgaactttaagatcagacataacattgaagacggcagcgtgcagctcgccgaccactatcagcagaacacacccatcggcgacggacccgtgctgttgcccgacaaccattacctgagcacgcagagcgccctttccaaggaccctaacgaaaagagagatcacatggtgctgctcgagttcgtgaccgccgctggcattaccctgggcatggacgagctgtacaaaagatcccgtgacatcagccacggctttcctcccgcagtggcagcccaagacgacgggaccctgccaatgagttgtgcccaggagtccggtatggatagacacccagctgcctgtgccagcgctaggattaacgtgtaa

SEQ ID NO: 887 - DNA, 855 bp, Artificial Sequence
  Modified Open Reading Frame
atggtgtccaaaggcgaagagctgttcaccggcgtggtgcctatcctggtggagctggacggcgacgtgaacggtcataaatttagcgtgtccggcgagggggaaggcgacgccacctatggcaagctcacgctgaaattcatctgtaccaccggcaaattgcccgttccctggcccaccctcgtgaccaccctgacctacggggttcagtgcttcagcagataccccgaccacatgaagcaacacgacttcttcaagtccgccatgcccgaaggctacgtgcaagaaagaaccatcttttttaaggacgacggaaactacaagaccagagccgaggtgaagtttgagggagacaccctggtgaacagaatcgagctgaagggcatcgacttcaaagaggacggcaacatcttgggccacaaactggagtacaactacaacagccacaacgtgtacatcatggccgacaaacagaaaaacgggatcaaggtgaactttaagatcagacataacattgaagacggcagcgtgcagctcgccgaccactatcagcagaacacacccatcggcgacggacccgtgctgttgcccgacaaccattacctgagcacgcagagcgccctttccaaggaccctaacgaaaagagagatcacatggtgctgctcgagttcgtgaccgccgccggcatcaccctgggcatggacgagctgtacaaaagatcccgtgacatcagccacggctttcctcccgcagtggcagcccaagacgacgggaccctgccaatgagttgtgcccaggagtccggtatggatagacacccagctgcctgtgccagcgctaggattaacgtgtaa

SEQ ID NO: 888 - DNA, 855 bp, Artificial Sequence
  Modified Open Reading Frame
atggtgtccaaaggcgaagagctgttcaccggcgtggtgcctatcctggtggagctggacggcgacgtgaacggtcataaatttagcgtgtccggcgagggggaaggcgacgccacctatggcaagctcacgctgaaattcatctgtaccaccggcaaattgcccgttccctggcccaccctcgtgaccaccctgacctacggggttcagtgcttcagcagataccccgaccacatgaagcaacacgacttcttcaagtccgccatgcccgaaggctacgtgcaagaaagaaccatcttttttaaggacgacggaaactacaagaccagagccgaggtgaagtttgagggagacaccctggtgaacagaatcgagctgaagggcatcgacttcaaagaggacggcaacatcttgggccacaaactggagtacaactacaacagccacaacgtgtacatcatggccgacaaacagaaaaacgggatcaaggtgaactttaagatcagacataacattgaagacggcagcgtgcagctcgccgaccactatcagcagaacacacccatcggcgacggacccgtgctgttgcccgacaaccattacctgagcacgcagagcgccctttccaaggaccctaacgaaaagagagatcacatggtgctgctcgagttcgtgaccgccgccggcatcaccctgggcatggacgagctgtacaaaagatcccgtgacatcagccacggctttcctcccgcagtggcagcccaagacgacgggaccctgccaatgagttgtgcccaggagtccggtatggatagacacccagctgcctgtgccagcgccaggatcaacgtgtaa

SEQ ID NO: 889 - DNA, 855 bp, Artificial Sequence
  Modified Open Reading Frame
atggtgtccaaaggcgaagagctgttcaccggcgtggtgcctatcctggtggagctggacggcgacgtgaacggtcataaatttagcgtgtccggcgagggggaaggcgacgccacctatggcaagctcacgctgaaattcatctgtaccaccggcaaattgcccgttccctggcccaccctcgtgaccaccctgacctacggggttcagtgcttcagcagataccccgaccacatgaagcaacacgacttcttcaagtccgccatgcccgaaggctacgtgcaagaaagaaccatcttttttaaggacgacggaaactacaagaccagagccgaggtgaagtttgagggagacaccctggtgaacagaatcgagctgaagggcatcgacttcaaagaggacggcaacatcttgggccacaaactggagtacaactacaacagccacaacgtgtacatcatggccgacaaacagaaaaacgggatcaaggtgaactttaagatcagacataacattgaagacggcagcgtgcagctcgccgaccactatcagcagaacacacccatcggcgacggacccgtgctgttgcccgacaaccattacctgagcacgcagagcgccctttccaaggaccctaacgaaaagagagatcacatggtgctgctcgagttcgtgaccgccgccggcatcaccctgggcatggacgagctgtacaagagatcccgtgacatcagccacggctttcctcccgcagtggcagcccaagacgacgggaccctgcccatgagttgtgcccaggagtccggtatggatagacacccagctgcctgtgccagcgccaggatcaacgtgtaa

SEQ ID NO: 890 - DNA, 855 bp, Artificial Sequence
  Modified Open Reading Frame
atggtgtccaaaggcgaagagctgttcaccggcgtggtgcctatcctggtggagctggacggcgacgtgaacggtcataaatttagcgtgtccggcgagggggaaggcgacgccacctatggcaagctcacgctgaaattcatctgtaccaccggcaaattgcccgttccctggcccaccctcgtgaccaccctgacctacggggttcagtgcttcagcagataccccgaccacatgaagcaacacgacttcttcaagtccgccatgcccgaaggctacgtgcaagaaagaaccatcttttttaaggacgacggaaactacaagaccagagccgaggtgaagtttgagggagacaccctggtgaacagaatcgagctgaagggcatcgacttcaaagaggacggcaacatcttgggccacaaactggagtacaactacaacagccacaacgtgtacatcatggccgacaaacagaaaaacgggatcaaggtgaactttaagatcagacataacattgaagacggcagcgtgcagctcgccgaccactatcagcagaacacacccatcggcgacggacccgtgctgttgcccgacaaccattacctgagcacgcagagcgccctttccaaggaccctaacgaaaagagagatcacatggtgctgctcgagttcgtgaccgccgccggcatcaccctgggcatggacgagctgtacaagagatcccgtgacatcagccacggctttcctcccgcagtggcagcccaagacgacgggaccctgcccatgagctgtgcccaggagtccggtatggatagacacccagctgcctgtgccagcgccaggatcaacgtgtaa

SEQ ID NO: 891 - DNA, 855 bp, Artificial Sequence
  Modified Open Reading Frame
atggtgtccaaaggcgaagagctgttcaccggcgtggtgcctatcctggtggagctggacggcgacgtgaacggtcataaatttagcgtgtccggcgagggggaaggcgacgccacctatggcaagctcacgctgaaattcatctgtaccaccggcaaattgcccgttccctggcccaccctcgtgaccaccctgacctacggggtccagtgcttcagcagataccccgaccacatgaagcagcacgacttcttcaagtccgccatgcccgaaggctacgtgcaagaaagaaccatcttttttaaggacgacggaaactacaagaccagagccgaggtgaagtttgagggagacaccctggtgaacagaatcgagctgaagggcatcgacttcaaagaggacggcaacatcttgggccacaaactggagtacaactacaacagccacaacgtgtacatcatggccgacaaacagaaaaacgggatcaaggtgaactttaagatcagacataacattgaagacggcagcgtgcagctcgccgaccactatcagcagaacacacccatcggcgacggacccgtgctgttgcccgacaaccattacctgagcacgcagagcgccctttccaaggaccctaacgaaaagagagatcacatggtgctgctcgagttcgtgaccgccgccggcatcaccctgggcatggacgagctgtacaagagatcccgtgacatcagccacggctttcctcccgcagtggcagcccaagacgacgggaccctgcccatgagctgtgcccaggagtccggtatggatagacacccagctgcctgtgccagcgccaggatcaacgtgtaa

SEQ ID NO: 892 - DNA, 855 bp, Artificial Sequence
  Modified Open Reading Frame
atggtgtccaaaggcgaagagctgttcaccggcgtggtgcctatcctggtggagctggacggcgacgtgaacggtcataaatttagcgtgtccggcgagggggaaggcgacgccacctatggcaagctcacgctgaagttcatctgcaccaccggcaaattgcccgttccctggcccaccctcgtgaccaccctgacctacggggtccagtgcttcagcagataccccgaccacatgaagcagcacgacttcttcaagtccgccatgcccgaaggctacgtgcaagaaagaaccatcttttttaaggacgacggaaactacaagaccagagccgaggtgaagtttgagggagacaccctggtgaacagaatcgagctgaagggcatcgacttcaaagaggacggcaacatcttgggccacaaactggagtacaactacaacagccacaacgtgtacatcatggccgacaaacagaaaaacgggatcaaggtgaactttaagatcagacataacattgaagacggcagcgtgcagctcgccgaccactatcagcagaacacacccatcggcgacggacccgtgctgttgcccgacaaccattacctgagcacgcagagcgccctttccaaggaccctaacgaaaagagagatcacatggtgctgctcgagttcgtgaccgccgccggcatcaccctgggcatggacgagctgtacaagagatcccgtgacatcagccacggctttcctcccgcagtggcagcccaagacgacgggaccctgcccatgagctgtgcccaggagtccggtatggatagacacccagctgcctgtgccagcgccaggatcaacgtgtaa

SEQ ID NO: 893 - DNA, 855 bp, Artificial Sequence
  Modified Open Reading Frame
atggtgtccaaaggcgaagagctgttcaccggcgtggtgcctatcctggtggagctggacggcgacgtgaacggtcataagtttagcgtgtccggcgagggggaaggcgacgccacctatggcaagctcacgctgaagttcatctgcaccaccggcaaattgcccgttccctggcccaccctcgtgaccaccctgacctacggggtccagtgcttcagcagataccccgaccacatgaagcagcacgacttcttcaagtccgccatgcccgaaggctacgtgcaagaaagaaccatcttttttaaggacgacggaaactacaagaccagagccgaggtgaagtttgagggagacaccctggtgaacagaatcgagctgaagggcatcgacttcaaagaggacggcaacatcttgggccacaaactggagtacaactacaacagccacaacgtgtacatcatggccgacaaacagaaaaacgggatcaaggtgaactttaagatcagacataacatcgaagacggcagcgtgcagctcgccgaccactatcagcagaacacacccatcggcgacggacccgtgctgttgcccgacaaccattacctgagcacgcagagcgccctttccaaggaccctaacgaaaagagagatcacatggtgctgctcgagttcgtgaccgccgccggcatcaccctgggcatggacgagctgtacaagagatcccgtgacatcagccacggctttcctcccgcagtggcagcccaagacgacgggaccctgcccatgagctgtgcccaggagtccggtatggatagacacccagctgcctgtgccagcgccaggatcaacgtgtaa

SEQ ID NO: 894 - DNA, 855 bp, Artificial Sequence
  Modified Open Reading Frame
atggtgtccaaaggcgaagagctgttcaccggcgtggtgcctatcctggtggagctggacggcgacgtgaacggtcataagtttagcgtgtccggcgagggggaaggcgacgccacctatggcaagctgacgctgaagttcatctgcaccaccggcaaactgcccgttccctggcccaccctcgtgaccaccctgacctacggggtccagtgcttcagcagataccccgaccacatgaagcagcacgacttcttcaagtccgccatgcccgaaggctacgtgcaagaaagaaccatcttttttaaggacgacggaaactacaagaccagagccgaggtgaagtttgagggagacaccctggtgaacagaatcgagctgaagggcatcgacttcaaagaggacggcaacatcttgggccacaaactggagtacaactacaacagccacaacgtgtacatcatggccgacaaacagaaaaacgggatcaaggtgaactttaagatcagacataacatcgaagacggcagcgtgcagctcgccgaccactatcagcagaacacacccatcggcgacggacccgtgctgttgcccgacaaccattacctgagcacgcagagcgccctttccaaggaccctaacgaaaagagagatcacatggtgctgctcgagttcgtgaccgccgccggcatcaccctgggcatggacgagctgtacaagagatcccgtgacatcagccacggctttcctcccgcagtggcagcccaagacgacgggaccctgcccatgagctgtgcccaggagtccggtatggatagacacccagctgcctgtgccagcgccaggatcaacgtgtaa

SEQ ID NO: 895 - DNA, 855 bp, Artificial Sequence
  Modified Open Reading Frame
atggtgtccaaaggcgaagagctgttcaccggcgtggtgcctatcctggtggagctggacggcgacgtgaacggtcataagtttagcgtgtccggcgagggcgaaggcgacgccacctatggcaagctgaccctgaagttcatctgcaccaccggcaaactgcccgtgccctggcccaccctcgtgaccaccctgacctacggggtccagtgcttcagcagataccccgaccacatgaagcagcacgacttcttcaagtccgccatgcccgaaggctacgtgcaagaaagaaccatcttttttaaggacgacggaaactacaagaccagagccgaggtgaagtttgagggagacaccctggtgaacagaatcgagctgaagggcatcgacttcaaagaggacggcaacatcttgggccacaaactggagtacaactacaacagccacaacgtgtacatcatggccgacaaacagaaaaacgggatcaaggtgaactttaagatcagacataacatcgaagacggcagcgtgcagctcgccgaccactatcagcagaacacacccatcggcgacggacccgtgctgttgcccgacaaccattacctgagcacgcagagcgccctttccaaggaccctaacgaaaagagagatcacatggtgctgctcgagttcgtgaccgccgccggcatcaccctgggcatggacgagctgtacaagagatcccgtgacatcagccacggctttcctcccgcagtggcagcccaagacgacgggaccctgcccatgagctgtgcccaggagtccggtatggatagacacccagctgcctgtgccagcgccaggatcaacgtgtaa

SEQ ID NO: 896 - DNA, 855 bp, Artificial Sequence
  Modified Open Reading Frame
atggtcagcaaaggggaagagttattcacgggagtagtgcccatcctggtggagctcgacggcgacgttaatggccataagtttagtgtgtctggggagggcgagggtgatgctacctacgggaagctcaccctcaaattcatttgcaccacgggtaagttgccggtaccatggcctaccttggttacgacacttacctatggtgtacaatgttttagccgttacccagatcacatgaagcagcacgacttctttaagtctgccatgcctgaaggatacgtccaagagaggacgatattcttcaaggacgatggcaactataagactcgtgctgaagtcaagttcgagggggacaccctcgtcaatcgaatcgaattgaagggcattgacttcaaagaggatggcaacatcctcggccataaactggagtacaattataactcccataacgtctatatcatggcagacaaacaaaagaacggtattaaggtgaatttcaagattcgccataatatcgaggatgggtccgtacaacttgcggaccattaccagcagaacacgcccatcggggatgggcctgttctgctgcctgataatcattacttgagcacgcagagtgctctaagtaaagaccctaacgaaaaaagggaccatatggtgctcctagagttcgtcactgccgcggggataaccctcggcatggacgaactctataaaaggagcagagatatttctcacggcttcccgccggccgtcgctgcccaggatgatggcactctcccgatgagctgtgcgcaagagagcgggatggaccgccatcccgctgcttgcgcatcagctcgaataaatgtttaa

SEQ ID NO: 897 - DNA, 855 bp, Artificial Sequence
  Modified Open Reading Frame
atggtctcaaaaggcgaggagctgttcactggcgtggtccccatcctggtggagctcgacggcgacgtgaacggccacaagtttagcgtgtccggagagggcgagggggacgccacctatggcaaactgaccttgaagttcatctgcactaccggcaaactgcccgtgccgtggcccaccctcgtgaccaccctgacctacggagtccagtgcttcagcaggtaccccgaccacatgaagcagcacgacttcttcaagtccgccatgcccgagggctacgtgcaggagcggaccatcttctttaaggacgacggcaactataagactagagccgaggtcaagttcgagggtgacacccttgtgaacagaatcgagctgaagggcatcgacttcaaagaggatggcaacatcctgggccacaagctggagtacaactacaacagccacaatgtgtacatcatggcggacaagcagaagaacggtatcaaggtgaactttaagatcaggcacaacatagaagacgggagcgtgcagctcgccgaccactatcagcagaacactccgattggcgacgggcccgtgctcctccccgacaaccattatctgagcactcagagcgccctctccaaggaccctaacgagaagagagatcacatggtgctgctcgagttcgttaccgccgcgggcatcaccctggggatggacgagctctacaagagatcccgcgacattagccacggctttcctccagccgtggctgcgcaagacgacggcaccctgccgatgagttgcgcacaggagtccggcatggacagacacccggcagcctgcgcgagcgccagaatcaacgtctaa

SEQ ID NO: 898 - DNA, 855 bp, Artificial Sequence
  Modified Open Reading Frame
atggtcagcaaaggggaagagctcttcactggggttgtccccatcctcgtcgaactcgacggggatgtgaatgggcataagttttccgtgagtggcgagggcgagggcgacgccacttacggaaaacttacgctcaaattcatatgcaccacgggaaagctcccggtgccgtggccgacgttagtgacaacactgacgtatggcgtccagtgcttcagtcggtatcccgaccatatgaagcagcacgacttttttaagtcggcgatgccagaaggatacgtccaggagcggacgatattcttcaaagacgacggcaactataagactagggccgaagtcaaatttgaaggcgatacccttgtcaataggattgaactcaagggtatcgacttcaaggaggacgggaatattctggggcacaagctcgagtataattacaacagccataatgtgtacattatggctgataagcagaagaatggaattaaagttaatttcaagatccgtcacaatattgaggacggatcggtccaactagcggaccactaccaacagaatactcccatcggggacggcccggtcctcctcccggataatcactacttgagtactcaaagtgcattatccaaggatccgaacgaaaagagggaccacatggtccttcttgagttcgtgacggccgcggggataaccctaggtatggatgagctctataagagatccagagatatttctcatggatttcctccggcggtggcggcacaagacgatgggacactcccaatgtcttgtgcgcaggagtctgggatggaccgccacccagctgcctgcgccagcgctcggataaacgtgtag

SEQ ID NO: 899 - DNA, 855 bp, Artificial Sequence
  Modified Open Reading Frame
atggtatcaaagggagaagagcttttcacaggcgtcgtccccatcctggtggagctggacggcgacgtgaacggccacaagttcagcgtgtccggggagggcgagggtgacgccacctatggcaagctgaccttgaagttcatctgcactaccgggaagctccccgtgccctggcccaccctcgtgactacactgacatacggggtccagtgcttcagtaggtaccccgaccacatgaagcagcacgacttcttcaagtcggccatgccggagggctacgtccaggagaggaccatcttctttaaggacgacggtaactataagacgagagccgaggttaagttcgagggtgacaccctcgtgaacagaatcgagctgaagggcatcgacttcaaagaggatggcaacatcctgggccacaagctggagtacaactacaacagccacaacgtctacatcatggccgacaagcagaagaacggtatcaaggtgaacttcaagatcagacacaacatagaggacggcagcgtgcagctcgccgaccactatcagcagaacacgcccatcggcgatgggcctgttctgctgccagataaccattatctgagcacccagagcgccctctccaaggaccctaacgagaagagggaccacatggtcctactcgagttcgttaccgccgccggcatcaccctggggatggacgaactgtacaagaggtcccgcgacataagccacggctttcctccagccgtggctgcacaggacgacgggaccctgcccatgagctgcgctcaggagtccggcatggacaggcatcccgccgcctgtgcgagcgcgaggatcaacgtgtaa

SEQ ID NO: 900 - DNA, 855 bp, Artificial Sequence
  Modified Open Reading Frame
atggtatcaaagggcgaggagcttttcaccggcgtggtgccgatcctggtggagctggacggcgacgtgaacggccacaagttcagcgtgtccggggagggcgagggtgatgccacctacggcaaactgaccttgaagttcatctgcacgaccggcaaactgcccgtgccctggcccaccctcgtgacgactctgacctacggagtccagtgcttcagcaggtaccccgaccacatgaaacagcacgacttcttcaagtcggccatgcccgagggctacgtccaggagcggaccatcttctttaaagacgacggtaactataagactagagccgaggttaagtttgaaggcgataccctagtgaatcgaatcgaactcaagggcatcgacttcaaagaagatggcaacatcctgggccacaagctggagtacaactacaacagccacaatgtgtacatcatggccgacaagcagaagaacgggataaaggtgaacttcaagatcaggcacaacatagaggacggcagcgtgcagctcgccgaccactatcagcagaacacgcccatcggcgatgggcctgttctgctgccagataaccattatctgagcacccagagcgccctctccaaggaccctaacgagaagcgggaccacatggtgctgcttgagttcgttaccgccgccggcatcacgctgggtatggacgagctgtacaagaggtcccgagacataagccacggctttcctccagccgtggccgcacaggacgacgggaccctgccaatgagctgcgcccaggagtccggcatggacaggcatcccgccgcctgtgcgagcgcgaggatcaacgtgtaa

SEQ ID NO: 901 - DNA, 855 bp, Artificial Sequence
  Modified Open Reading Frame
atggttagtaaaggggaggagctgttcacaggtgttgttcccatccttgtagaattagatggggacgttaatggtcataagttctcagtgagtggcgaaggggagggagatgctacatatggcaagctcactctcaaattcatctgtaccactgggaagttgcccgtgccatggcccacgcttgtaaccacgttaacatatggggttcagtgctttagcaggtatcccgaccatatgaagcaacacgactttttcaagagtgctatgcccgagggctatgtccaggaaagaacaatcttttttaaggatgatgggaattataaaactcgggcagaggttaaatttgaaggcgataccctagtaaacagaattgagttaaaagggatcgacttcaaagaggacggcaacatattgggacacaagctagagtacaattataacagccataatgtttatattatggctgataagcagaagaatgggattaaagttaactttaagattcgtcacaacattgaggatggctcagttcaactggccgatcattatcaacaaaacactcccataggtgacggtcccgtgttgctcccagacaaccattacctatctacgcaatctgctctatctaaagacccgaacgagaagagagaccatatggtgcttctagagtttgtcactgctgcaggaattaccttaggcatggacgaactttacaagcgttcccgagacatatctcatggctttcctccggcagttgccgcacaagacgatgggacattacctatgtcctgtgcacaagaaagtggaatggatcggcaccctgctgcatgcgcttctgccaggataaatgtataa

SEQ ID NO: 902 - DNA, 855 bp, Artificial Sequence
  Modified Open Reading Frame
atggttagtaaaggggaggagctgttcacaggtgttgttcccatccttgtagaattagatggggacgtgaatggtcacaagttctcagtgagtggcgaaggggagggagatgctacatatggcaagctcactctcaaattcatctgtaccactgggaagttgcccgtgccctggcccacgcttgtaaccacgttaacatatggggttcagtgctttagccggtatcccgaccatatgaaacaacacgattttttcaagagtgctatgcccgagggctatgtccaggaaagaacaatcttttttaaggatgatgggaattataaaactcgggcagaggttaaatttgaaggcgacaccctagtaaacagaatagagttaaaagggatcgacttcaaagaggacggcaacatattgggacacaagctagagtacaactacaacagccataatgtttatattatggctgacaagcagaagaatgggattaaagttaactttaagattcgtcacaacattgaggatggctcagttcaactggccgatcattaccagcaaaacactcccataggtgacggtcccgtgttactcccagacaaccattacctatctacgcaatctgcactatctaaagacccgaacgagaagagagaccatatggtgcttctagagtttgtcactgctgcaggaattaccttaggcatggacgaactttacaagcgttcccgagacatatctcatggctttccaccggcagttgccgcacaagacgatgggacactacctatgtcatgtgcacaagaaagtggaatggatcggcaccctgctgcatgcgcttctgccaggataaatgtataa

SEQ ID NO: 903 - DNA, 855 bp, Artificial Sequence
  Modified Open Reading Frame
atggttagtaaaggggaggagctgttcacaggtgttgttcccatccttgtagaattagatggggacgtgaatggtcacaagttctcagtgagtggcgaaggggagggagatgctacatatggcaagctcactctcaaattcatctgtaccactgggaagttgcccgtgccctggcccacgcttgtaaccacgttaacatatggggttcagtgctttagccggtatcccgaccatatgaaacaacacgattttttcaagagtgctatgcccgagggctatgtccaggaaagaacaatcttttttaaggatgatgggaattataaaactcgggcagaggttaaatttgaaggcgacaccctagtaaacagaatagagttaaaagggatcgacttcaaagaggacggcaacatattgggacacaagctagagtacaactacaacagccataatgtttatattatggctgacaagcagaagaatgggattaaagttaactttaagattcgtcacaacattgaggatggctcagttcaactggccgatcattaccagcaaaacactcccataggtgacggtcccgtgttactcccagacaaccattacctatctacgcaatctgcactgtctaaagacccgaacgagaagagagaccatatggtgcttctagagtttgtcactgctgcaggaattaccttaggcatggacgaactttacaagcgttcccgagacatatctcatggctttccaccggcagttgccgcacaagacgatgggacactacctatgtcatgtgcacaagaaagtggaatggatcggcaccctgctgcatgcgcttctgccaggataaatgtataa

SEQ ID NO: 904 - DNA, 855 bp, Artificial Sequence
  Modified Open Reading Frame
atggtgtcgaagggggaagaactgttcaccggggtggtgcccatcctggtggagctggacggtgacgtgaacggtcacaagttcagcgtcagcggtgagggtgagggggatgcgacgtatggtaagctgactttgaagtttatctgtacgacggggaagttgccggtgccgtggccgacgctggtgactaccctgacgtacggggtgcagtgcttcagtcggtacccggaccacatgaagcagcacgacttcttcaagtcggcgatgcccgaaggttatgtccaggagcggaccatcttctttaaagacgatggcaactacaagactcgagccgaggttaaattcgagggggacaccttggttaaccggatcgagttgaagggcatcgactttaaagaagatggtaatatcctgggtcataagttggagtataactataattcgcataacgtttacatcatggctgacaagcagaagaatggtattaaggtgaattttaagatccgccataatattgaagacggtagtgttcaattggcggatcattatcagcagaatacgcccatcggtgatgggccggttcttctccccgataaccattatctgagcacgcaatcggcgctgtccaaggacccgaacgaaaagcgggaccatatggtcctgcttgagtttgtgacggcggcggggatcacgttggggatggacgagttgtataagcgatctcgggacatctcccacgggttcccgccggcggtggctgctcaggacgatgggacgcttcccatgtcctgtgcgcaggagtcgggcatggaccgacatccggcggcgtgtgcgtctgctcggatcaacgtttga

SEQ ID NO: 905 - DNA, 855 bp, Artificial Sequence
  Modified Open Reading Frame
atggtaagcaaaggggaggagctattcaccggcgtggtgccgattctggtagaactggacggggacgtcaacgggcacaagttctctgtgtctggtgaaggcgagggcgacgcgacctatggtaagctgactctgaagttcatctgtacgaccggaaagctgcctgtcccctggcctacacttgtgacgacgttgacgtacggagttcagtgcttctcccggtacccggaccacatgaagcagcatgacttcttcaagtctgcgatgcctgagggctacgtgcaggagcgcacgatcttctttaaggacgacggtaactataagacccgtgctgaagtgaagttcgagggtgacacactagtcaacaggatcgagctgaagggcattgacttcaaggaggacgggaatatactgggacacaaactcgagtacaactacaattctcacaacgtgtatatcatggcggacaagcagaagaacggcataaaggtgaacttcaagattcggcataatatcgaagatgggtccgtgcagctcgccgatcactaccagcagaacacgccgatcggtgacggccccgtccttctgccggacaatcattatttgtccacgcagtcagcgttatcgaaggacccaaatgagaagagagatcatatggtgctccttgagttcgtgacagcggccggcatcacgctggggatggacgagctctataagagatcccgcgacatcagccacggctttcctcccgctgtggccgcacaggacgatggcaccctgccaatgtcctgtgcgcaggagagcgggatggacagacacccagccgcatgtgcgagcgcgaggatcaacgtatga

SEQ ID NO: 906 - DNA, 855 bp, Artificial Sequence
  Modified Open Reading Frame
atggtgagtaaaggtgaggagctgttcaccggcgtggtgccaatactggtggagctggacggcgacgtgaacggccacaagttcagcgtgtccggcgagggtgagggcgatgccacctatggcaagctcaccctcaagtttatctgtaccacaggtaaactgccagtgccttggcccaccttggtgaccaccctcacctatggcgtgcagtgcttctcgaggtaccccgaccacatgaaacagcacgatttcttcaagtccgccatgcccgaggggtacgtccaggaaagaaccatcttctttaaggacgacggcaactataagacgcgtgccgaggtcaagttcgagggtgacaccctcgtgaaccgaatcgagctgaagggcatcgacttcaaggaagatggtaatatcctgggccacaaactggagtacaattacaacagccataatgtgtacattatggctgataaacagaagaatgggatcaaggtgaactttaagatcaggcacaatatcgaggacggcagcgtgcagctcgccgatcactaccagcagaacacaccgatcggcgacggtcccgtgctgctgcccgataaccattatctgagcacccagtccgccctatcgaaggaccctaatgagaagcgtgatcacatggtgctgctcgagttcgtgactgccgccggcattaccctgggcatggacgagctttacaagagatcgcgcgacataagccacggatttcctccagccgtagccgcgcaggacgacgggaccctgcccatgagctgcgctcaggagtccggcatggacaggcatcccgccgcctgcgcgagcgccaggataaacgtgtaa

SEQ ID NO: 907 - DNA, 855 bp, Artificial Sequence
  Modified Open Reading Frame
atggtgtccaagggcgaggagctgttcaccggcgtggtgcctatcctggtggagctggacggcgacgtgaacggccacaagtttagcgtgtccggcgagggcgaaggcgacgccacctacggcaagctgaccctgaagttcatctgcaccaccggcaaactgcccgtgccctggcccaccctcgtgaccaccctgacctacggagtccagtgcttcagcagataccccgaccacatgaagcagcacgacttcttcaagtccgccatgcccgagggctacgtgcaggaaagaaccatcttctttaaggacgacggaaactataagaccagagccgaggtgaagttcgagggagacaccctggtgaacagaatcgagctgaagggcatcgacttcaaagaggacggcaacatcctgggccacaaactggagtacaactacaacagccacaacgtgtacatcatggccgacaaacagaagaacgggatcaaggtgaactttaagatcagacacaacatcgaagacggcagcgtgcagctcgccgaccactaccagcagaacacacccatcggcgacggacccgtgctgctgcccgataaccattacctgagcactcagagcgccctgtccaaggaccctaacgagaagagagatcacatggtgctgctcgagttcgttaccgccgccggcatcaccctgggcatggacgagctgtacaagagatcccgcgacatcagccacggctttcctcccgccgtggccgcccaagacgacgggaccctgcccatgagctgcgcccaggagtccggcatggacagacatcccgccgcctgtgccagcgccaggatcaacgtgtaa

SEQ ID NO: 908 - DNA, 855 bp, Artificial Sequence
  Modified Open Reading Frame
atggtgtccaagggcgaggagctgttcaccggcgtggtgccgatcctggtggagctggacggcgacgtgaacggccacaagttcagcgtgtccggggagggcgagggtgatgccacctacggcaaactgaccttgaagttcatctgcacgaccggcaaactgcccgtgccctggcccaccctcgtgaccactctgacctacggagtccagtgcttcagcaggtaccccgaccacatgaaacagcacgacttcttcaagtcggccatgcccgagggctacgtccaggagcggaccatcttcttcaaggacgacggtaactataagactagagccgaggttaagtttgaaggcgacaccctagtgaatcgaatcgaactcaaggggatcgacttcaaagaagatggcaacatcctgggccacaagctggagtacaactacaacagccacaatgtgtacatcatggccgacaagcagaagaacggtataaaggtgaactttaagatcagacacaacatagaggacggcagcgtgcagctcgccgaccactatcagcagaacacgcccatcggcgatgggcctgttctgctgccagacaaccattatctgagcacccagagcgccctctccaaggaccctaacgagaagcgggaccacatggtgctgcttgagttcgttaccgccgccggcatcacgctgggtatggacgagctgtacaagaggtcccgcgacatcagccacggctttcctccagccgtggccgcacaggacgacgggaccctgccaatgagctgcgcccaggagtccggcatggacaggcatcccgccgcctgtgcgagcgcgaggatcaacgtgtaa

SEQ ID NO: 909 - DNA, 855 bp, Artificial Sequence
  Modified Open Reading Frame
atggtatcgaagggggaggagctgttcacgggcgtggtgcctatcctggtggagctggacggcgacgtgaacggccacaagtttagcgtgtccggcgagggcgaaggcgacgccacctacggcaagctgaccctgaagttcatctgcaccaccggcaaactgcccgtgccctggcccaccctcgtgaccaccctgacctacggagtccagtgcttcagcagataccccgaccacatgaagcagcacgacttcttcaagtccgccatgcccgagggctacgtgcaggaaagaaccatcttctttaaggacgacggaaactataagaccagggccgaggtgaagttcgagggagacaccctggtgaacagaatcgagctgaagggcatcgacttcaaagaggacggcaacatcctgggccacaagctggagtacaactacaacagccacaacgtgtacatcatggccgacaaacagaagaacgggatcaaggtgaactttaagatcagacacaacatcgaagacggcagcgtgcagctcgccgatcactaccagcagaacacaccgatcggcgacggccccgtgctgctgcccgacaaccattacctgagcactcagagcgccctgtccaaggaccctaacgagaagagagatcacatggtgctgctcgagttcgttaccgccgccggcatcaccctgggcatggacgagctctacaagagatcccgcgacatcagccacggctttcctcccgccgtggcggcccaagacgacgggaccctgcccatgagctgtgcccaggagtccggcatggacagacaccccgccgcctgtgccagcgccaggatcaacgtgtaa

SEQ ID NO: 910 - DNA, 855 bp, Artificial Sequence
  Modified Open Reading Frame
atggtatcgaagggggaggagctgttcacgggcgtggtgcctatcctggtggagctggacggcgacgtgaacggccacaagtttagcgtgtccggcgagggcgaaggcgacgccacctacggcaagctgaccctgaagttcatctgcaccaccggcaaactgcccgtgccctggcccaccctcgtgaccaccctgacctacggagtccagtgcttcagcagataccccgaccacatgaagcagcacgacttcttcaagtccgccatgcccgagggctacgtgcaggaaagaaccatcttctttaaggacgacggaaactataagaccagggccgaggtgaagttcgagggagacaccctggtgaacagaatcgagctgaagggcatcgacttcaaagaggacggcaacatcctgggccacaagctggagtacaactacaacagccacaacgtgtacatcatggccgacaaacagaagaacgggatcaaggtgaactttaagatcagacacaacatcgaagacggcagcgtgcagctcgccgatcactaccagcagaacacaccgatcggcgacggccccgtgctgctgcccgacaaccattacctgagcactcagagcgccctgtccaaggaccctaacgagaagagagatcacatggtgctgctcgagttcgttaccgccgccggcatcaccctgggcatggacgagctgtacaagagatcccgcgacatcagccacggctttcctcccgccgtggcggcccaagacgacgggaccctgcccatgagctgcgcccaggagtccggcatggacagacaccccgccgcctgtgccagcgccaggatcaacgtgtaa

SEQ ID NO: 911 - DNA, 855 bp, Artificial Sequence
  Modified Open Reading Frame
atggtgtccaagggcgaagagctttttacaggggtggttcctatactggtggaattggacggcgacgtgaacggccacaagttttctgtgagtggtgagggtgaaggtgatgccacatatggcaagctgaccctgaagttcatatgcacgacgggcaagttaccggtgccgtggcccaccctggtcaccaccctgacctacggagtccagtgcttctctcggtatccggatcatatgaaacagcatgacttcttcaagagtgctatgccagaaggttatgtccaggagcgtaccatcttctttaaagacgatggtaactacaaaacgagggccgaggtgaagttcgaaggagacaccctggtcaatcgtattgagttgaagggcatcgactttaaagaagatggtaacatccttggacataagcttgagtacaactataacagtcataatgtttacataatggccgataaacagaagaatggcatcaaggtaaactttaaaatccgtcataacattgaagacggcagcgtgcagttggcggatcattaccagcaaaacacacccataggagacggtcccgttctgttgcccgacaaccattacctaagtacgcaatcagccctgtcaaaggaccccaacgagaagagggaccatatggtgctgcttgagttcgtcaccgccgccgggatcaccctgggcatggatgagctttataagcgcagccgtgacatcagccacggattcccgccggcggtggccgcgcaggacgacgggacgctgcccatgagctgtgcccaagagagcgggatggacagacatcccgcggcctgtgcctctgcgcgtataaacgtgtag

SEQ ID NO: 912 - DNA, 855 bp, Artificial Sequence
  Modified Open Reading Frame
atggtgagtaagggcgaagagctgttcaccggggtggtgcctatcctggtggagctggacggcgacgtgaacggccacaagtttagcgtgtccggcgagggcgaaggtgacgccacctacggcaagctgaccttgaagttcatctgtaccaccggcaaactgcccgtgccctggcccaccctggtgaccaccctcacctacggtgtccagtgcttcagtaggtaccccgaccacatgaagcagcacgacttcttcaagtccgccatgccggagggctacgttcaggaacgtaccatcttctttaaggacgatggcaactataagactcgagccgaagttaagttcgagggtgacaccctcgtaaatcggatcgagcttaagggcatcgactttaaagaggatggtaacatcctgggccacaaactggagtacaactacaacagccacaacgtctacatcatggcggacaagcagaagaatggtatcaaggtgaactttaagatcagacacaacatcgaggacggctccgtgcagctcgctgatcattaccagcagaacacgcccatcggcgatgggcctgtactgctgcccgacaaccattatctgagcactcagagtgcgttgtcgaaggaccctaatgagaagcgagatcacatggtgctgctcgagttcgtgaccgccgcaggcatcaccctgggcatggacgagctttacaagaggtcccgcgacatctcccacggctttcctccagccgtggccgcccaggacgacggaacgcttcctatgagctgcgcgcaggagtccggcatggacagacacccagccgcctgtgccagcgctaggatcaatgtgtaa

SEQ ID NO: 913 - DNA, 855 bp, Artificial Sequence
  Modified Open Reading Frame
atggtgtccaagggcgaggagctgttcaccggcgtggtgcctatactggtggagctggacggcgacgtgaacggccacaagtttagcgtgtccggcgagggcgaaggcgacgccacctatggcaaactgaccctgaagttcatctgcaccaccggcaaactgcccgtgccctggcccaccctcgtgaccaccctgacctacggagtccagtgcttcagcagataccccgaccacatgaagcagcacgacttcttcaagtccgcgatgcccgagggctacgtgcaggagcgaaccatcttctttaaggacgatggaaactacaagaccagagccgaggtgaagttcgagggagacaccctcgtgaacagaatcgagctgaagggcatcgacttcaaagaggacggcaacatcctgggccacaaactggagtacaactacaacagccacaacgtgtacatcatggccgacaaacagaagaacgggatcaaggtgaactttaagatcagacacaacatcgaagacggcagcgtgcagctcgccgaccactaccagcagaacacacccatcggcgacggacccgtgctgctgcccgacaaccattacctgagcacccagagcgccctgtccaaggaccctaacgagaagagagatcacatggtgctgctcgagttcgtgaccgccgccggcatcaccctgggcatggacgagctgtacaagagatcccgcgacatcagccacggctttcctcccgccgtggccgcccaagacgacgggaccctgcccatgagctgcgcacaggagtccggcatggacagacaccccgccgcctgtgccagcgccaggatcaacgtgtaa

SEQ ID NO: 914 - DNA, 855 bp, Artificial Sequence
  Modified Open Reading Frame
atggtgagtaagggcgaagagctgttcaccggggtggtgcctatcctggtggagctggacggcgacgtgaacggccacaagtttagcgtgtccggcgagggcgaaggtgacgccacctacggcaagctgaccttgaagttcatctgtaccaccggcaaactgcccgtgccctggcccaccctggtgaccaccctcacctacggtgtccagtgcttcagtaggtaccccgaccacatgaagcagcacgacttcttcaagtccgccatgccggagggctacgttcaggaacgtaccatcttctttaaggacgatggcaactataagactcgagccgaagttaagttcgagggtgacaccctcgtaaatcggatcgagcttaagggcatcgactttaaagaggatggtaacatcctgggccacaaactggagtacaactacaacagccacaacgtctacatcatggcggacaagcagaagaatggtatcaaggtgaactttaagatcagacacaacatcgaggacggctccgtgcagctcgctgatcattaccagcagaacacgcccatcggcgatgggcctgtactgctgcccgacaaccattatctgagcactcagagtgcgttgtcgaaggaccctaatgagaagcgagatcacatggtgctgctcgagttcgtgaccgccgcaggcatcaccctgggcatggacgagctttacaagaggtcccgcgacatctcccacggctttcctcccgccgtggccgcccaggacgacggaaccctgcccatgagctgcgcgcaggagtccggcatggacagacacccagccgcctgtgccagcgccaggatcaacgtctaa

SEQ ID NO: 915 - DNA, 855 bp, Artificial Sequence
  Modified Open Reading Frame
atggttagtaaaggggaggagctgttcacaggtgttgttcccatccttgtagaattagatggggacgtgaatggtcacaagttctcagtgagtggcgaaggggagggagatgctacatatggcaagctcactctaaaatttatttgtaccactgggaagttgcccgtgccctggcccacgcttgtaaccacgttaacatatggggttcagtgctttagccggtatcccgaccatatgaaacaacacgattttttcaagagtgctatgcccgagggctatgtccaggaaagaacaatcttttttaaggatgatgggaattataaaactcgggcagaggttaaatttgaaggcgacaccctagtaaacagaatagagttaaaagggatcgacttcaaagaggacggcaacatattgggacacaagctagagtacaactataacagccataatgtttatattatggctgacaagcagaagaatgggataaaagttaactttaagattcgtcacaacattgaggatggctcagttcaactggccgatcattaccagcaaaacactcccataggtgacggtcccgtgttactcccagacaaccattacctatctacgcaatctgcattgtctaaagacccgaacgaaaagagagaccatatggtgcttctagagtttgtcactgctgcaggaattaccttaggcatggacgaactttacaagcgttcccgagacatatctcatggctttccaccagcagttgccgcacaagacgatgggacactacctatgtcatgtgcacaagaaagtggaatggatcggcaccctgctgcatgcgcttctgcccggataaatgtataa

SEQ ID NO: 916 - DNA, 855 bp, Artificial Sequence
  Modified Open Reading Frame
atggtgtccaaaggcgaagagctgttcaccggcgtggtgcctatcctggtggagctggacggcgacgtgaacggtcataagtttagcgtgtccggcgagggcgaaggcgacgccacctatggcaagctgaccctgaagttcatctgcaccaccggcaaactgcccgtgccctggcccaccctcgtgaccaccctgacctacggggtccagtgcttcagcagataccccgaccacatgaagcagcacgacttcttcaagtccgccatgcccgaaggctacgtgcaagaaagaaccatcttttttaaggacgacggaaactacaagaccagagccgaggtgaagtttgagggagacaccctggtgaacagaatcgagctgaagggcatcgacttcaaagaggacggcaacatcttgggccacaaactggagtacaactacaacagccacaacgtgtacatcatggccgacaaacagaaaaacgggatcaaggtgaactttaagatcagacataacatcgaagacggcagcgtgcagctcgccgaccactatcagcagaacacacccatcggcgacggacccgtgctgttgcccgacaaccattacctgagcacgcagagcgccctgtccaaggaccctaacgaaaagagagatcacatggtgctgctcgagttcgtgaccgccgccggcatcaccctgggcatggacgagctgtacaagagatcccgtgacatcagccacggctttcctcccgcagtggcagcccaagacgacgggaccctgcccatgagctgtgcccaggagtccggcatggatagacacccagccgcctgtgccagcgccaggatcaacgtgtaa

SEQ ID NO: 917 - DNA, 855 bp, Artificial Sequence
  Modified Open Reading Frame
atggtaagcaaaggagaagaattattcacaggagtggtgcctattttggtggagttggacggcgacgtgaacggacacaagttctcggtgtcgggcgagggcgagggcgacgccacctacgggaagcttaccctgaagttcatctgcactacgggtaagcttcccgtgccctggcccaccttagtcacgacgctgacctatggcgtgcagtgcttcagtcggtaccccgaccacatgaagcagcacgacttcttcaagtcggccatgccggagggctatgtccaagaacgtaccatcttctttaaagacgatggcaattacaagacccgggccgaggtgaagttcgagggcgacaccttggtgaaccggatcgagctaaagggcatcgactttaaagaagatggtaacattcttggacataagctcgagtataattataactcacacaatgtgtacatcatggccgacaagcagaagaacggaatcaaagtgaactttaagatccgtcacaacatcgaggacgggtccgttcagctcgccgaccactaccagcagaatacaccaataggagacggacccgtcttactgcccgacaatcattatttgtcgacacagtcagcactaagtaaggacccgaacgagaagcgggaccacatggtgctgctagagttcgtcactgccgcgggtatcaccctcggcatggacgagctctacaaaagatcgcgggacatcagccacggctttccaccagccgtggctgcgcaggacgacgggacgctgccgatgagctgcgcccaggagtccgggatggacaggcatcccgctgcatgtgcaagcgcgcgaataaacgtgtga

SEQ ID NO: 918 - DNA, 855 bp, Artificial Sequence
  Modified Open Reading Frame
atggtgagtaaaggcgaagagctgttcaccggggtggtgcctatcctggtggagctggacggcgacgtgaacggccacaagtttagcgtgtccggcgagggcgaaggtgacgccacctacggcaagctgaccttgaagttcatctgtaccaccggcaaactgcccgtgccctggcccaccctggtgaccaccctcacctacggtgtccagtgcttcagtaggtaccccgaccacatgaagcagcacgacttcttcaagtccgccatgccggagggctacgttcaggaacgtaccatcttctttaaggacgatggtaactataagactcgagccgaggttaagttcgagggtgacaccctagtaaaccggatcgagcttaagggcatcgactttaaagaggatggtaacatcctgggccacaaactggagtacaactacaacagccacaacgtctacatcatggcggacaaacagaagaatggtatcaaggtgaactttaagatcagacacaacatcgaggacggctccgtgcagctcgctgatcattaccagcagaacacgcccatcggcgatgggcctgtactgctgcccgacaaccattatctgagcactcagagtgcgttgtcgaaggaccctaatgagaagcgagatcacatggtgctgctcgagttcgtgaccgccgcaggcatcaccctgggcatggacgagctttacaagaggtcccgcgacatcagccacggctttcctcccgccgtggccgcccaggacgacggaaccctgcccatgagctgcgcgcaggagtccggcatggacagacacccagccgcctgtgccagcgccaggatcaacgtctaa

SEQ ID NO: 919 - DNA, 855 bp, Artificial Sequence
  Modified Open Reading Frame
atggtaagcaaaggggaagaattatttacgggcgtggtgcctattttggtggagctggacggcgacgtgaacggacacaagttctcggtgtcgggcgagggcgagggcgacgccacctacgggaagcttaccctgaagttcatctgcactacgggtaagcttcccgtgccctggcccaccttagtgaccaccctcacctatggcgtgcagtgcttcagtcggtaccccgaccacatgaagcagcacgacttcttcaagtcggccatgcccgagggctatgtccaagagcgtaccatcttctttaaagacgatggcaattacaagacccgggccgaggtgaagttcgagggcgacaccttggtgaaccggatcgagctaaagggcatcgactttaaagaagatggtaacattcttggacataagctcgagtataattataactcgcacaatgtgtatatcatggccgacaagcagaagaacggaatcaaagtgaactttaagatccgtcacaacatcgaggacgggtccgttcagctcgccgaccactaccagcagaatacaccaataggagacggacccgtcttgctgcccgacaatcactacttgtcgacacagtcagcactaagtaaggacccgaacgagaagcgggaccacatggtgctgctagagttcgtcactgccgcgggtatcaccctcggcatggacgagctctacaaaagatcccgggacatcagccacggctttcctccagccgtggctgcgcaggacgacgggacgctgccgatgagctgcgcccaggagtccggcatggacaggcatcccgctgcctgtgccagtgccaggatcaacgtataa

SEQ ID NO: 920 - DNA, 855 bp, Artificial Sequence
  Modified Open Reading Frame
atggtgtccaagggcgaggagctgttcaccggcgtggtgcctatcctggtggagctggacggcgacgtgaacggccacaagtttagcgtgtccggggagggcgagggtgacgccacctacggcaagctgaccttgaagttcatctgcaccaccggcaaactgcccgtgccctggcccaccctcgtgaccaccctgacctacggagtccagtgcttcagcaggtaccccgaccacatgaagcagcacgacttcttcaagtcggccatgcccgagggctacgtccaggaaaggaccatcttctttaaggacgacggtaactataagaccagagccgaggttaagttcgagggagacaccctggtgaacagaatcgagctgaagggcatcgacttcaaagaggatggcaatatcctgggccacaagctggagtacaactacaacagccacaacgtgtacatcatggccgacaagcagaagaacggtatcaaggtgaactttaagatcagacacaacatagaggacggcagcgtgcagctcgccgaccactaccagcagaacacgcccatcggcgatgggcctgttctgctgccagacaaccattatctgagcacccagagcgccctctccaaggaccctaacgagaagagagatcacatggtgctgctcgagttcgttaccgccgccggcatcaccctgggcatggacgagctgtacaagaggtcccgcgacatcagccacggctttcctccagccgtggccgcacaggacgacgggaccctgcccatgagctgcgcccaggagtccggcatggacaggcatcccgccgcctgtgccagcgcgaggatcaacgtgtaa

SEQ ID NO: 921 - DNA, 855 bp, Artificial Sequence
  Modified Open Reading Frame
atggtgtccaaaggcgaagagctgttcaccggcgtggtgcctatcctggtggagctggacggcgacgtgaacggtcataagtttagcgtgtccggcgagggcgaaggcgacgccacctatggcaagctgaccctgaagttcatctgcaccaccggcaaactgcccgtgccctggcccaccctcgtgaccaccctgacctacggagtccagtgcttcagcagataccccgaccacatgaagcagcacgacttcttcaagtccgccatgcccgagggctacgtgcaagaaagaaccatcttttttaaggacgacggaaactacaagaccagagccgaggtgaagtttgagggagacaccctggtgaacagaatcgagctgaagggcatcgacttcaaagaggacggcaacatcttgggccacaaactggagtacaactacaacagccacaacgtgtacatcatggccgacaaacagaaaaacgggatcaaggtgaactttaagatcagacataacatcgaagacggcagcgtgcagctcgccgaccactatcagcagaacacacccatcggcgacggacccgtgctgttgcccgacaaccattacctgagcacgcagagcgccctgtccaaggaccctaacgaaaagagagatcacatggtgctgctcgagttcgtgaccgccgccggcatcaccctgggcatggacgagctgtacaagagatcccgtgacatcagccacggctttcctcccgcagtggccgcccaagacgacgggaccctgcccatgagctgtgcccaggagtccggcatggatagacacccagccgcctgtgccagcgccaggatcaacgtgtaa

SEQ ID NO: 922 - DNA, 855 bp, Artificial Sequence
  Modified Open Reading Frame
atggtgtccaaaggcgaggagctgttcaccggcgtggtgcctatcctggtggagctggacggcgacgtgaacggtcataagtttagcgtgtccggcgagggcgaaggcgacgccacctatggcaagctgaccctgaagttcatctgcaccaccggcaaactgcccgtgccctggcccaccctcgtgaccaccctgacctacggagtccagtgcttcagcagataccccgaccacatgaagcagcacgacttcttcaagtccgccatgcccgagggctacgtgcaagaaagaaccatcttttttaaggacgacggaaactacaagaccagagccgaggtgaagtttgagggagacaccctggtgaacagaatcgagctgaagggcatcgacttcaaagaggacggcaacatcttgggccacaaactggagtacaactacaacagccacaacgtgtacatcatggccgacaaacagaaaaacgggatcaaggtgaactttaagatcagacataacatcgaagacggcagcgtgcagctcgccgaccactatcagcagaacacacccatcggcgacggacccgtgctgctgcccgacaaccattacctgagcacgcagagcgccctgtccaaggaccctaacgaaaagagagatcacatggtgctgctcgagttcgtgaccgccgccggcatcaccctgggcatggacgagctgtacaagagatcccgtgacatcagccacggctttcctcccgccgtggccgcccaagacgacgggaccctgcccatgagctgtgcccaggagtccggcatggatagacacccagccgcctgtgccagcgccaggatcaacgtgtaa

SEQ ID NO: 923 - DNA, 855 bp, Artificial Sequence
  Modified Open Reading Frame
atggtgtccaaaggcgaggagctgttcaccggcgtggtgcctatcctggtggagctggacggcgacgtgaacggtcataagtttagcgtgtccggcgagggcgaaggcgacgccacctatggcaagctgaccctgaagttcatctgcaccaccggcaaactgcccgtgccctggcccaccctcgtgaccaccctgacctacggagtccagtgcttcagcagataccccgaccacatgaagcagcacgacttcttcaagtccgccatgcccgagggctacgtgcaagaaagaaccatcttttttaaggacgacggaaactacaagaccagagccgaggtgaagtttgagggagacaccctggtgaacagaatcgagctgaagggcatcgacttcaaagaggacggcaacatcttgggccacaaactggagtacaactacaacagccacaacgtgtacatcatggccgacaaacagaagaacgggatcaaggtgaactttaagatcagacataacatcgaagacggcagcgtgcagctcgccgaccactaccagcagaacacacccatcggcgacggacccgtgctgctgcccgacaaccattacctgagcacgcagagcgccctgtccaaggaccctaacgaaaagagagatcacatggtgctgctcgagttcgtgaccgccgccggcatcaccctgggcatggacgagctgtacaagagatcccgtgacatcagccacggctttcctcccgccgtggccgcccaagacgacgggaccctgcccatgagctgtgcccaggagtccggcatggatagacacccagccgcctgtgccagcgccaggatcaacgtgtaa

SEQ ID NO: 924 - DNA, 855 bp, Artificial Sequence
  Modified Open Reading Frame
atggttagcaaaggcgaagaattatttacgggcgtggtgcctattttggtggagctggacggcgacgtgaacggacacaagttctcggtgtcgggcgagggcgagggcgacgccacctacgggaagcttaccctgaagttcatctgcactacgggtaagcttcccgtgccctggcccaccttagtgaccaccctcacctatggcgtgcagtgcttcagtcggtaccccgaccacatgaagcagcacgacttcttcaagtcggccatgcccgagggctatgtccaagagcgtaccatcttctttaaagacgatggcaattacaagacccgggccgaggtgaagttcgagggcgacaccttggtgaaccggatcgagctaaagggcatcgactttaaagaagatggtaacattcttggacataagctcgagtataattataactcgcacaatgtgtatatcatggccgacaagcagaagaacggaatcaaagtgaactttaagatccgtcacaacatcgaggacgggtccgttcagctcgccgaccactaccagcagaatacaccaataggagacggacccgtcttgctgcccgacaatcactatctatcgacacagtcagcactaagtaaggacccgaacgagaagcgggaccacatggtgctgctggagttcgtcactgccgcgggtatcaccctcggcatggacgagctctacaaaagatcccgggacatcagccacggctttcctccagccgtggctgcgcaggacgacgggacgctgccgatgagctgcgcccaggagtccggcatggacaggcatcccgctgcctgtgccagtgccaggatcaatgtgtaa

SEQ ID NO: 925 - DNA, 855 bp, Artificial Sequence
  Modified Open Reading Frame
atggtgtccaaaggcgaggagctgttcaccggcgtggtgcctatcctggtggagctggacggcgacgtgaacggtcataagtttagcgtgtccggcgagggcgaaggcgacgccacctatggcaagctgaccctgaagttcatctgcaccaccggcaaactgcccgtgccctggcccaccctcgtgaccaccctgacctacggagtccagtgcttcagcagataccccgaccacatgaagcagcacgacttcttcaagtccgccatgcccgagggctacgtgcaagaaagaaccatcttttttaaggacgacggaaactacaagaccagagccgaggtgaagtttgagggagacaccctggtgaacagaatcgagctgaagggcatcgacttcaaagaggacggcaacatcttgggccacaaactggagtacaactacaacagccacaacgtgtacatcatggccgacaaacagaagaacgggatcaaggtgaactttaagatcagacataacatcgaagacggcagcgtgcagctcgccgaccactaccagcagaacacacccatcggcgacggacccgtgctgctgcccgacaaccattacctgagcacccagagcgccctgtccaaggaccctaacgagaagagagatcacatggtgctgctcgagttcgtgaccgccgccggcatcaccctgggcatggacgagctgtacaagagatcccgtgacatcagccacggctttcctcccgccgtggccgcccaagacgacgggaccctgcccatgagctgtgcccaggagtccggcatggatagacacccagccgcctgtgccagcgccaggatcaacgtgtaa

SEQ ID NO: 926 - DNA, 855 bp, Artificial Sequence
  Modified Open Reading Frame
atggtgtccaaaggcgaggagctgttcaccggcgtggtgcctatcctggtggagctggacggcgacgtgaacggtcataagtttagcgtgtccggcgagggcgaaggcgacgccacctatggcaagctgaccctgaagttcatctgcaccaccggcaaactgcccgtgccctggcccaccctcgtgaccaccctgacctacggagtccagtgcttcagcagataccccgaccacatgaagcagcacgacttcttcaagtccgccatgcccgagggctacgtgcaagaaagaaccatcttttttaaggacgacggaaactacaagaccagagccgaggtgaagtttgagggagacaccctggtgaacagaatcgagctgaagggcatcgacttcaaagaggacggcaacatcttgggccacaaactggagtacaactacaacagccacaacgtgtacatcatggccgacaaacagaagaacgggatcaaggtgaactttaagatcagacataacatcgaagacggcagcgtgcagctcgccgaccactaccagcagaacacacccatcggcgacggacccgtgctgctgcccgacaaccattacctgagcacccagagcgccctgtccaaggaccctaacgagaagagagatcacatggtgctgctcgagttcgtgaccgccgccggcatcaccctgggcatggacgagctgtacaagagatcccgcgacatcagccacggctttcctcccgccgtggccgcccaagacgacgggaccctgcccatgagctgcgcccaggagtccggcatggatagacacccagccgcctgtgccagcgccaggatcaacgtgtaa

SEQ ID NO: 927 - DNA, 855 bp, Artificial Sequence
  Modified Open Reading Frame
atggttagcaaaggagaagaattatttacgggcgtggtgcctattttggtggagctggacggcgatgtgaacggacacaagttctcggtgtcgggcgagggcgagggcgacgccacctacgggaagcttaccctgaagttcatctgcactacgggtaagcttcccgtgccctggcccaccttagtgaccaccctcacctatggcgtgcagtgcttcagtcggtaccccgaccacatgaagcagcacgacttcttcaagtcggccatgccggagggctatgtccaagagcgtaccatcttctttaaagacgatggcaattacaagacccgggccgaggtgaagttcgagggcgacaccttggtgaaccggatcgagctaaagggcatcgactttaaagaagatggtaacattcttggacataagctcgagtataattataactcgcacaatgtgtacatcatggccgacaagcagaagaacggaatcaaagtgaactttaagatccgtcacaacatcgaggacgggtccgttcagctcgccgaccactaccagcagaatacaccaataggagacggacccgtcttactgccagacaatcactatttgtcaacccagtcggcactaagtaaggacccgaatgaaaagcgggaccacatggtgctgctggagttcgtcactgccgcgggtatcaccctcggcatggacgagctgtataagagatcccgggacatcagccacggctttcctccagccgtggctgcgcaggacgacgggacgctgcccatgagctgcgcccaggagtccggcatggacaggcatcccgctgcctgtgccagtgccaggatcaacgtgtaa

SEQ ID NO: 928 - DNA, 855 bp, Artificial Sequence
  Modified Open Reading Frame
atggtgtccaaaggcgaggagctgttcaccggcgtggtgcctatcctggtggagctggacggcgacgtgaacggtcataagtttagcgtgtccggcgagggcgaaggcgacgccacctatggcaagctgaccctgaagttcatctgcaccaccggcaaactgcccgtgccctggcccaccctcgtgaccaccctgacctacggagtccagtgcttcagcagataccccgaccacatgaagcagcacgacttcttcaagtccgccatgcccgagggctacgtgcaagaaagaaccatcttttttaaggacgacggaaactacaagaccagagccgaggtgaagtttgagggagacaccctggtgaacagaatcgagctgaagggcatcgacttcaaagaggacggcaacatcttgggccacaaactggagtacaactacaacagccacaacgtgtacatcatggccgacaaacagaagaacgggatcaaggtgaactttaagatcagacataacatcgaagacggcagcgtgcagctcgccgaccactaccagcagaacacacccatcggcgacggacccgtgctgctgcccgacaaccattacctgagcacccagagcgccctgtccaaggaccctaacgagaagagagatcacatggtgctgctcgagttcgtgaccgccgccggcatcaccctgggcatggacgagctgtacaagagatcccgcgacatcagccacggctttcctcccgccgtggccgcccaagacgacgggaccctgcccatgagctgcgcccaggagtccggcatggacagacacccagccgcctgtgccagcgccaggatcaacgtgtaa

SEQ ID NO: 929 - DNA, 855 bp, Artificial Sequence
  Modified Open Reading Frame
atggtgtccaaaggcgaggagctgttcaccggcgtggtgcctatcctggtggagctggacggcgacgtgaacggtcataagtttagcgtgtccggcgagggcgaaggcgacgccacctatggcaagctgaccctgaagttcatctgcaccaccggcaaactgcccgtgccctggcccaccctcgtgaccaccctgacctacggagtccagtgcttcagcagataccccgaccacatgaagcagcacgacttcttcaagtccgccatgcccgagggctacgtgcaagaaagaaccatcttttttaaggacgacggaaactacaagaccagagccgaggtgaagtttgagggagacaccctggtgaacagaatcgagctgaagggcatcgacttcaaagaggacggcaacatcttgggccacaaactggagtacaactacaacagccacaacgtgtacatcatggccgacaaacagaagaacgggatcaaggtgaactttaagatcagacataacatcgaagacggcagcgtgcagctcgccgaccactaccagcagaacacacccatcggcgacggacccgtgctgctgcccgacaaccattacctgagcacccagagcgccctgtccaaggaccctaacgagaagagagatcacatggtgctgctcgagttcgtgaccgccgccggcatcaccctgggcatggacgagctgtacaagagatcccgcgacatcagccacggctttcctcccgccgtggccgcccaagacgacgggaccctgcccatgagctgcgcccaggagtccggcatggacagacaccccgccgcctgtgccagcgccaggatcaacgtgtaa

SEQ ID NO: 930 - DNA, 855 bp, Artificial Sequence
  Modified Open Reading Frame
atggtatcaaaaggggaagagctgtttacgggtgtcgttccaatcctggttgagctcgacggagatgtgaatggtcacaaattctccgtgagtggagagggggaaggagacgccacgtacggtaaactgacactcaagtttatctgtacgactggcaagctgccagtcccgtggccgacattggtcaccacgttaacgtacggtgtccaatgtttcagcaggtatcccgaccacatgaagcagcatgattttttcaagtctgccatgccggagggatacgtgcaggagcgtaccatcttctttaaagacgatggcaattataagactcgagcggaggtcaagtttgagggtgacacgcttgtcaaccgcatcgagcttaagggcatcgactttaaagaagatggtaacatcctcggccacaagttggagtataattacaactcccacaacgtctatattatggcggataaacagaagaacggaataaaggttaattttaagatccgccataatatagaggatgggagtgttcagctggcagatcactaccagcagaacactcccatcggtgatggaccggtgctccttcccgacaaccattacctctccactcagtcagctctgagcaaggatcccaacgagaagcgagaccacatggtcttgcttgagttcgtcaccgcggcgggaatcacgctaggtatggacgagctctataagaggagccgcgatatctcgcatggattcccgcccgcggtggcggctcaagacgatgggaccttgcccatgagctgcgctcaagaatcaggaatggatcgacacccggcagcctgtgcgtcggcacggataaacgtgtaa

SEQ ID NO: 931 - DNA, 855 bp, Artificial Sequence
  Modified Open Reading Frame
atggtgtccaaaggcgaggagctgttcaccggcgtggtgcctatcctggtggagctggacggcgacgtgaacggccataagtttagcgtgtccggcgagggcgaaggcgacgccacctatggcaagctgaccctgaagttcatctgcaccaccggcaaactgcccgtgccctggcccaccctcgtgaccaccctgacctacggagtccagtgcttcagcagataccccgaccacatgaagcagcacgacttcttcaagtccgccatgcccgagggctacgtgcaagaaagaaccatcttttttaaggacgacggaaactacaagaccagagccgaggtgaagtttgagggagacaccctggtgaacagaatcgagctgaagggcatcgacttcaaagaggacggcaacatcttgggccacaaactggagtacaactacaacagccacaacgtgtacatcatggccgacaaacagaagaacgggatcaaggtgaactttaagatcagacacaacatcgaagacggcagcgtgcagctcgccgaccactaccagcagaacacacccatcggcgacggacccgtgctgctgcccgacaaccattacctgagcacccagagcgccctgtccaaggaccctaacgagaagagagatcacatggtgctgctcgagttcgtgaccgccgccggcatcaccctgggcatggacgagctgtacaagagatcccgcgacatcagccacggctttcctcccgccgtggccgcccaagacgacgggaccctgcccatgagctgcgcccaggagtccggcatggacagacaccccgccgcctgtgccagcgccaggatcaacgtgtaa

SEQ ID NO: 932 - DNA, 855 bp, Artificial Sequence
  Modified Open Reading Frame
atggtgtccaaaggcgaggagctgttcaccggcgtggtgcctatcctggtggagctggacggcgacgtgaacggccacaagtttagcgtgtccggcgagggcgaaggcgacgccacctacggcaagctgaccctgaagttcatctgcaccaccggcaaactgcccgtgccctggcccaccctcgtgaccaccctgacctacggagtccagtgcttcagcagataccccgaccacatgaagcagcacgacttcttcaagtccgccatgcccgagggctacgtgcaagaaagaaccatcttttttaaggacgacggaaactacaagaccagagccgaggtgaagttcgagggagacaccctggtgaacagaatcgagctgaagggcatcgacttcaaagaggacggcaacatcttgggccacaaactggagtacaactacaacagccacaacgtgtacatcatggccgacaaacagaagaacgggatcaaggtgaactttaagatcagacacaacatcgaagacggcagcgtgcagctcgccgaccactaccagcagaacacacccatcggcgacggacccgtgctgctgcccgacaaccattacctgagcacccagagcgccctgtccaaggaccctaacgagaagagagatcacatggtgctgctcgagttcgtgaccgccgccggcatcaccctgggcatggacgagctgtacaagagatcccgcgacatcagccacggctttcctcccgccgtggccgcccaagacgacgggaccctgcccatgagctgcgcccaggagtccggcatggacagacaccccgccgcctgtgccagcgccaggatcaacgtgtaa

SEQ ID NO: 933 - DNA, 855 bp, Artificial Sequence
  Modified Open Reading Frame
atggtttcgaagggtgaggagttgttcactggagtggtccccatcctcgtcgaactcgacggggatgtgaacggtcacaagttctccgttagtggagaaggcgagggtgatgccacttatggcaaactcaccctcaagtttatctgcactacggggaagctgccagtgccgtggccaaccttggtcacgactttgacctacggggtacagtgtttttcacggtaccccgatcacatgaagcagcatgacttcttcaagtccgctatgcccgaagggtatgttcaagagcggaccatcttctttaaagacgatggcaattacaagacccgtgccgaggtcaagttcgagggggacacgctggtgaaccgcatcgagcttaaaggcatcgactttaaagaagatgggaacatactcgggcataagctggagtataattacaacagccataacgtgtatatcatggcggacaagcagaagaatgggatcaaagtcaacttcaagatccgtcataacattgaggatggcagtgtgcagctggcggaccactaccagcagaacactcctatcggggacgggcccgtgctgctgccggacaaccactacttgagcacacagagcgcgctatcgaaggatcccaatgagaagcgtgatcacatggtgttacttgaatttgtgacagccgctgggatcacgctgggtatggacgagctctacaagaggagccgcgatatctctcatgggtttcctcctgcggtagccgctcaggacgacggcaccttgccgatgtcgtgtgctcaagagagtggtatggaccggcacccggcagcatgcgccagtgcccgaataaacgtctag

SEQ ID NO: 934 - DNA, 855 bp, Artificial Sequence
  Modified Open Reading Frame
atggtgtccaagggcgaggagctgttcaccggcgtggtgccgattctggtggagctggacggcgacgtcaacgggcacaagtttagtgtgtccggtgagggcgaaggcgacgccacctacggcaagctgaccctgaagttcatctgcaccaccggcaagctgcccgtgccctggcccaccctcgtgaccaccctgacctacggagtccagtgcttcagcagataccccgaccacatgaagcagcacgacttcttcaagtccgccatgcccgaagggtacgtgcaggagcggaccatcttctttaaggacgatgggaactataagactagggcagaggtgaagttcgagggagacaccctggtgaacaggatcgagctgaagggcatcgatttcaaggaggacggcaacatcctgggccacaagctggagtacaactacaacagccacaacgtgtacatcatggccgataagcagaagaacgggatcaaggtgaactttaagatcaggcacaacatcgaagacggtagtgtgcagctcgccgaccactaccagcagaacacaccgatcggcgacggacccgtgctcctgcccgacaaccattacctgagcacacagagcgccctgtccaaggacccgaacgagaagagagatcacatggtgctcctcgagttcgtgactgccgccggcatcaccctgggcatggacgagctgtacaagcgctcccgcgacatcagccacggctttcctccagccgtggctgcacaggacgacgggacgctaccgatgagctgtgcccaggagtccggcatggacagacaccccgccgcctgtgccagcgccaggatcaacgtgtaa

SEQ ID NO: 935 - DNA, 855 bp, Artificial Sequence
  Modified Open Reading Frame
atggtgtccaaaggcgaggagctgttcaccggcgtggtgcctatcctggtggagctggacggcgacgtgaacggccacaagtttagcgtgtccggcgagggcgaaggcgacgccacctacggcaagctgaccctgaagttcatctgcaccaccggcaaactgcccgtgccctggcccaccctcgtgaccaccctgacctacggagtccagtgcttcagcagataccccgaccacatgaagcagcacgacttcttcaagtccgccatgcccgagggctacgtgcaggaaagaaccatcttttttaaggacgacggaaactacaagaccagagccgaggtgaagttcgagggagacaccctggtgaacagaatcgagctgaagggcatcgacttcaaagaggacggcaacatcctgggccacaaactggagtacaactacaacagccacaacgtgtacatcatggccgacaaacagaagaacgggatcaaggtgaactttaagatcagacacaacatcgaagacggcagcgtgcagctcgccgaccactaccagcagaacacacccatcggcgacggacccgtgctgctgcccgacaaccattacctgagcacccagagcgccctgtccaaggaccctaacgagaagagagatcacatggtgctgctcgagttcgtgaccgccgccggcatcaccctgggcatggacgagctgtacaagagatcccgcgacatcagccacggctttcctcccgccgtggccgcccaagacgacgggaccctgcccatgagctgcgcccaggagtccggcatggacagacaccccgccgcctgtgccagcgccaggatcaacgtgtaa

SEQ ID NO: 936 - DNA, 855 bp, Artificial Sequence
  Modified Open Reading Frame
atggtgtccaagggcgaggagctgttcaccggcgtcgtgcctatcctagtagagctcgacggcgacgtgaacggccacaagtttagcgtgtccggcgagggcgagggcgacgcaacctatggtaagctgaccctgaagttcatctgcaccacaggtaagctgcccgtgccctggcccaccctagtgaccacgctgacgtacggagtacagtgctttagcagatacccggatcacatgaagcagcacgacttcttcaagtcggccatgccggagggctatgtccaggagcggaccatcttctttaaagacgacgggaactataaaactagagccgaggtcaagttcgagggggacacccttgtgaacagaatcgagctgaagggcatcgatttcaaagaggatggcaacatcctgggacataagctggagtacaactacaacagccataacgtctacatcatggccgataagcagaagaatgggatcaaggtgaactttaagatcaggcacaatatcgaggacggcagcgtgcagctagccgatcactatcagcagaacactcccatcggcgatggccccgtgctgctgcccgataaccattacctgagtacacagagcgccctgtcaaaggacccgaacgagaagcgtgatcacatggtgctgctcgagttcgtgacggccgccggcatcacgctgggcatggacgagctatacaagaggtcccgcgacatcagccacggctttcctccagccgtggccgcccaggacgacgggaccctgcccatgagctgcgcacaggagtccggcatggacagacatccagccgcctgtgccagcgccaggatcaacgtgtaa

SEQ ID NO: 937 - DNA, 855 bp, Artificial Sequence
  Modified Open Reading Frame
atggtatcaaaaggcgaggaattgtttactggtgtagtccctatcctcgttgaactggacggtgacgttaatggacacaaattttctgtctctggcgaaggagaaggcgatgctacttatgggaaacttactctaaaattcatatgcacgacaggcaaattgcctgtcccatggcctacgctcgtgaccacgttaacgtatggagtgcagtgcttcagcaggtatccagatcacatgaaacaacatgacttctttaaatcggctatgcccgaagggtatgttcaggagcgaacaatcttcttcaaagatgacggcaactacaagacaagggctgaagttaagtttgagggagatacgctagtcaaccgcatagaattgaagggtatagattttaaggaagacgggaacatactgggccataagcttgagtacaattataactcacacaacgtctacattatggcggataagcaaaagaatggaatcaaggtaaacttcaaaatacgacacaatattgaagacggatccgtgcagctagcagatcactaccagcagaatactcccatcggtgacgggccagtacttctgcccgacaaccattacttatccacccagtccgcactctcgaaggatcctaatgagaaacgagatcacatggtcctcttggaatttgttactgcagcaggcatcactctaggaatggatgagttgtacaaacggagtcgagatatcagccatggcttcccaccagcagttgcagcgcaagatgacggaactttgccaatgtcctgtgcacaggagtcaggcatggatagacaccccgcggcctgcgccagcgcacgtataaatgtgtaa

SEQ ID NO: 938 - DNA, 855 bp, Artificial Sequence
  Modified Open Reading Frame
atggtatcaaaaggcgaggaattgtttactggtgtagtccctatcctcgttgaactggacggtgacgttaatggacacaaattttctgtctctggcgaaggagaaggcgatgctacttatgggaaacttactctaaaattcatatgcacgacaggcaaattgcctgtcccatggcctacgctcgtgaccacgttaacgtatggagtgcagtgcttcagcaggtatccagatcacatgaaacaacatgacttctttaaatcggctatgcccgaagggtatgttcaggagcgaacaatcttctttaaagatgacggcaactacaagacaagggctgaagttaagtttgagggagatacgctagtcaaccgcatagaattgaagggtatagattttaaggaagacgggaacatactgggccataagcttgagtacaattataactcacacaacgtctacattatggcggataagcaaaagaatggaatcaaggtaaacttcaaaatacgacacaatattgaagacggatccgtgcagctagcagatcactaccagcagaatactcccatcggtgacgggccagtacttctgcccgacaaccattacttatccacccagtccgcactctcgaaggatcctaatgagaaacgagatcacatggtcctcttggaatttgttactgcagcaggcatcactctaggaatggatgagttgtacaaacggagtcgagatatcagccatggcttcccaccagcagttgcagcgcaagatgacggaactttgccaatgtcctgtgcacaggagtcaggcatggatagacaccccgcggcctgcgccagcgcacgtataaatgtgtaa

SEQ ID NO: 939 - DNA, 855 bp, Artificial Sequence
  Modified Open Reading Frame
atggtaagtaagggagaagagctgttcaccggggtggtgcctatcctggtggagctggacggcgacgtgaacggccacaagtttagcgtgtccggcgagggcgaaggtgacgccacctacggcaagctgaccttgaagttcatctgtaccaccggcaaactgcccgtgccctggcccaccctggtgaccaccctcacctacggtgtccagtgcttcagtaggtaccccgaccacatgaagcagcacgacttcttcaagtccgccatgccggagggctacgttcaggaacgtaccatcttctttaaggacgatggtaactataagactcgggccgaggtgaagttcgagggagacaccttggtcaacagaatcgagcttaagggcatcgactttaaagaggatggtaacatcctgggccacaaactggagtacaactacaacagccacaacgtctacatcatggcggacaaacagaagaatggtatcaaggtgaactttaagatcagacacaacatcgaggacggctccgtgcagctcgctgatcattaccagcagaacacgcccatcggcgatgggcctgtactgctgcccgacaaccattatctgagcactcagagtgcgttgtcgaaggaccctaatgagaagcgagatcacatggtgctgctcgagttcgtgaccgccgcaggcatcaccctgggcatggacgagctttacaagcggtcccgcgacatcagccacggctttcctcccgccgtcgccgcccaggacgacgggacattgccgatgagctgcgcgcaggagtccggcatggatagacatccagccgcctgtgccagcgctcggatcaatgtctaa

SEQ ID NO: 940 - DNA, 855 bp, Artificial Sequence
  Modified Open Reading Frame
atggtatcaaaaggcgaggaattgtttactggtgtagtccctatcctcgttgaactggacggtgacgttaatggacacaaattttctgtctctggcgaaggagaaggcgatgctacttatgggaaacttactctaaaattcatatgcacgacaggcaaattgcctgtcccatggcctacgctcgtgaccacgttaacgtatggagtgcagtgcttcagcaggtatccagatcacatgaaacaacatgacttctttaaatcggctatgcccgaagggtatgtgcaggagcgaacaatcttctttaaagatgacggcaactacaagacaagggctgaagttaagtttgagggagatacgctagtcaaccgcatagaattgaagggtatagattttaaggaagacgggaacatactgggccataagcttgagtacaattataactcacacaacgtctacattatggcggataagcaaaagaatggaatcaaggtaaacttcaaaatacgacacaatattgaagacggatccgtgcagctagcagatcactaccagcagaatactcccatcggtgacgggccagtacttctgcccgacaaccattacttatccacccagtccgcactctcgaaggatcctaatgagaaacgagatcacatggtcctcttggaatttgttactgcagcaggcatcactctaggaatggatgagttgtacaaacggagtcgagatatcagccatggcttcccaccagcagttgcagcgcaagatgacggaactttgccaatgtcctgtgcacaggagtcaggcatggatagacaccccgcggcctgcgccagcgcacgtataaatgtgtaa

SEQ ID NO: 941 - DNA, 855 bp, Artificial Sequence
  Modified Open Reading Frame
atggtatcaaaaggcgaggaattgtttactggtgtagtccctatcctcgttgaactggacggtgacgttaatggacacaaattttctgtctctggcgaaggagaaggcgatgctacttatgggaaacttactctaaaattcatatgcacgacaggcaaattgcctgtcccatggcctacgctcgtgaccacgttaacgtatggagtgcagtgcttcagcaggtatccagatcacatgaaacaacatgacttctttaaatcggctatgcccgaagggtatgtgcaggagcgaacaatcttctttaaagatgacggcaactacaagacaagggctgaagttaagtttgagggagatacgctagtcaaccgcatagaattgaagggtatagattttaaggaagacgggaacatactgggccataagcttgagtacaattataactcacacaacgtctacattatggcggataagcaaaagaatggaatcaaggtaaacttcaaaatacgacacaatattgaagacggatccgtgcagctagcagatcactaccagcagaatactcccatcggtgacgggccagtacttctgcccgacaaccattacttatccacccagtccgcactctcgaaggatcctaatgagaaacgagatcacatggtcctcttggaatttgttactgcagcaggcatcactctaggaatggatgagttgtacaaacggagtagagatatcagccatggcttcccaccagcagttgcagcgcaagatgacggaactttgccaatgtcctgtgcacaggagtcaggcatggatagacaccccgcggcctgcgccagcgcacgtataaatgtgtaa

SEQ ID NO: 942 - DNA, 855 bp, Artificial Sequence
  Modified Open Reading Frame
atggtatcaaaaggcgaggaattgtttactggtgtagtccctatcctcgttgaactggacggtgacgttaatggacacaaattttctgtctctggcgaaggagaaggcgatgctacttatgggaaacttactctaaaattcatatgcacgacaggcaaattgcctgtcccatggcctacgctcgtgaccacgttaacgtatggagtgcagtgcttcagcaggtatccagatcacatgaaacaacatgacttctttaaatcggctatgcccgaagggtatgtgcaggagcgaacaatcttctttaaagatgacggcaactacaagacaagggctgaagttaagtttgagggagatacgctagtcaaccgcatagaattgaagggtatagattttaaggaagacgggaacatactgggccataagcttgagtacaattataactcacacaacgtctacattatggcggataagcaaaagaatggaatcaaggtaaacttcaaaatacgacacaatattgaagacggatccgtgcagctagcagatcactaccagcagaatactcccatcggtgacgggccagtacttctgcccgacaaccattacttatccacccagtccgcactctcgaaggatcctaatgagaaacgagatcacatggtcctcttggaatttgttactgcagcaggcatcactctaggaatggatgagttgtacaaacggagtagagatatcagccatggcttcccaccagcagttgcagcgcaagatgacggaactttgccaatgtcctgtgcacaggaatcaggcatggatagacaccccgcggcctgcgccagcgcacgtataaatgtgtaa

SEQ ID NO: 943 - DNA, 855 bp, Artificial Sequence
  Modified Open Reading Frame
atggtatcaaaaggcgaggaattgtttactggtgtagtccctatcctcgttgaactggacggtgacgttaatggacacaaattttctgtctctggcgaaggagaaggcgatgctacttatgggaaacttactctaaaattcatatgcacgacaggcaaattgcctgtcccatggcctacgctcgtgaccacgttaacgtatggagtgcagtgcttcagcaggtatccagatcacatgaaacaacatgacttctttaaatcggctatgcccgaagggtatgtgcaggagcgaacaatcttctttaaagatgacggcaactacaagacaagggctgaagttaagtttgagggagatacgctagtcaaccgcatagaattgaagggtatagattttaaggaagacgggaacatactgggccataagcttgagtacaattataactcacacaacgtctacattatggcggataagcaaaagaatggaatcaaggtaaacttcaaaatacgacacaatattgaagacggatccgtgcagctagcagatcactaccagcagaatactcccatcggtgacgggccagtacttctgcccgacaaccattacttatccacccagtccgcactctcgaaggatcctaatgagaaacgagatcacatggtcctcttggaatttgttactgcagcaggcatcactctaggaatggatgagttgtacaaacggagtagagatatcagccatggcttcccaccagcagttgcagcgcaagatgacggaactttgccaatgtcctgtgcacaggaatcagggatggatagacaccccgcggcctgcgccagcgcacgtataaatgtgtaa

SEQ ID NO: 944 - DNA, 855 bp, Artificial Sequence
  Modified Open Reading Frame
atggtatcaaaaggcgaggaattgtttactggtgtagtccctatcctcgttgaactggacggtgacgttaatggacacaaattttctgtctctggcgaaggagaaggcgatgctacttatgggaaacttactctaaaattcatatgcacgacaggcaaattgcctgtcccatggcctacgctcgtgaccacgttaacgtatggagtgcagtgcttcagcaggtatccagatcacatgaaacaacatgacttctttaaatcggctatgcccgaagggtatgtgcaggagcgaacaatcttctttaaagatgacggcaactacaagacaagagctgaagttaagtttgagggagatacgctagtcaaccgcatagaattgaagggtatagattttaaggaagacgggaacatactgggccataagcttgagtacaattataactcacacaacgtctacattatggcggataagcaaaagaatggaatcaaggtaaacttcaaaatacgacacaatattgaagacggatccgtgcagctagcagatcactaccagcagaatactcccatcggtgacgggccagtacttctgcccgacaaccattacttatccacccagtccgcactctcgaaggatcctaatgagaaacgagatcacatggtcctcttggaatttgttactgcagcaggcatcactctaggaatggatgagttgtacaaacggagtagagatatcagccatggcttcccaccagcagttgcagcgcaagatgacggaactttgccaatgtcctgtgcacaggaatcagggatggatagacaccccgcggcctgcgccagcgcacgtataaatgtgtaa

SEQ ID NO: 945 - DNA, 855 bp, Artificial Sequence
  Modified Open Reading Frame
atggtatctaagggcgaggagctgtttacgggcgtcgtccccatcctcgtcgagctagacggagacgtgaacggtcacaagttctccgtctccggtgagggtgagggcgacgccacgtacggcaagctcacattgaagttcatatgtacaacgggcaagctgcccgtgccatggcccaccctcgtaactaccctcacgtacggtgtccagtgtttctcgcgctacccggaccatatgaagcagcacgacttcttcaagtccgcgatgcccgagggctacgtccaggagcgcaccatcttcttcaaagacgatggaaactacaagacacgtgcggaggtgaagttcgagggcgacacccttgtcaaccgaatcgagctgaaaggcatcgacttcaaggaggatggcaacatcctgggccataagctggagtacaactacaactcccacaacgtctatattatggcggataagcagaagaatggcattaaggtcaacttcaagatccgccataatatagaggacgggtccgtccagctggcggaccactaccagcagaacacccccatcggcgacggacccgtcctcctgccggacaatcactacttgtccacgcagtccgcgctctcaaaggaccccaatgagaagcgcgatcacatggtcctgctggagttcgtcactgccgcggggataaccctcggcatggacgaactctacaagcgctcgcgcgacatctcccacgggtttccacccgcagtcgcggcgcaggacgatgggacactccccatgtcctgcgcgcaggagtccggcatggatagacatcctgccgcttgcgcgagcgccaggattaacgtgtga

SEQ ID NO: 946 - DNA, 855 bp, Artificial Sequence
  Modified Open Reading Frame
atggtatcaaaaggggaggagttatttacgggcgtggtccccatcctggtagagctagacggtgatgtcaatggacataagtttagcgtatcaggagagggggagggtgacgccacgtacgggaagcttaccctgaagttcatctgtactacagggaagcttcccgtgccgtggcccaccctcgtgacgactttaacatatggtgtccaatgttttagtcgttaccctgaccacatgaagcagcacgacttctttaagagtgccatgcctgaaggatatgtgcaagaacgcaccatattcttcaaggacgacggtaattacaagacgcgggctgaggtgaagttcgagggcgatacgctggtgaatcggatcgagctgaagggaatcgacttcaaggaagatggtaatattctagggcataaactagagtataactataattcccacaacgtgtatatcatggccgataaacagaaaaatggcataaaagtcaatttcaaaattcggcacaatattgaagacggttccgttcagctcgccgatcattaccagcaaaataccccgataggggatggccccgtgcttctgccagataaccattatctgagcactcagtccgcgttgagtaaggacccgaacgagaagcgggaccacatggtactcttagagtttgttaccgcggcgggaattaccttgggtatggacgagctctacaaaaggagtagggacatatcccatggtttcccgcccgcggtagcagcacaggacgatggcactttgccaatgtcctgtgcgcaggagagcggtatggaccgccatcctgcggcgtgcgcttcagcccgtattaacgtctga

SEQ ID NO: 947 - DNA, 855 bp, Artificial Sequence
  Modified Open Reading Frame
atggtatcaaaaggcgaggaattgtttactggtgtagtccctatcctcgttgaactggacggtgacgttaatggacacaaattttctgtctctggcgaaggagaaggcgatgctacttatgggaaacttactctaaaattcatatgcacgacaggcaaattgcctgtcccatggcctacgctcgtgaccacgttaacgtatggagtgcagtgcttcagcaggtatccagatcacatgaaacaacatgacttctttaaatcggctatgcccgaagggtatgtgcaggagcgaacaatcttctttaaagatgacggcaactacaagacaagagctgaagttaagtttgagggagatacgctagtcaaccgcatagaattgaagggtatagattttaaggaagacgggaacatactgggccataagcttgagtacaattataactcacacaacgtctacattatggcggataagcaaaagaatggaatcaaggtaaacttcaaaatacgacacaatattgaggacggatccgtgcagctagcagatcactaccagcagaatactcccatcggtgacgggccagtacttctgcccgacaaccattacttatccacccagtccgcactctcgaaggatcctaatgagaaacgagatcacatggtcctcttggaatttgttactgcagcaggcatcactctaggaatggatgagttgtacaaacggagtagagatatcagccatggcttcccaccagcagttgcagcgcaagatgacggaactttgccaatgtcctgtgcacaggaatcagggatggatagacaccccgcggcctgcgccagcgcacgtataaatgtgtaa

SEQ ID NO: 948 - DNA, 855 bp, Artificial Sequence
  Modified Open Reading Frame
atggtatcaaaaggcgaggaattgtttactggtgtagtccctatcctcgttgaactggacggtgacgttaatggacacaaattttctgtctctggcgaaggagaaggcgatgctacttatgggaaacttactctaaaattcatatgcacgacaggcaaattgcctgtcccatggcctacgctcgtgaccacgttaacgtatggagtgcagtgcttcagcaggtatccagatcacatgaaacaacatgacttctttaaatcggctatgcccgaagggtatgtgcaggagcgaacaatcttctttaaagatgacggcaactacaagacaagagctgaagttaagtttgagggagatacgctagtcaaccgcatagaattgaagggtatagattttaaggaagacgggaacatactgggccataagcttgaatacaattataactcacacaacgtctacattatggcggataagcaaaagaatggaatcaaggtaaacttcaaaatacgacacaatattgaggacggatccgtgcagctagcagatcactaccagcagaatactcccatcggtgacgggccagtacttctgcccgacaaccattacttatccacccagtccgcactctcgaaggatcctaatgagaaacgagatcacatggtcctcttggaatttgttactgcagcaggcatcactctaggaatggatgagttgtacaaacggagtagagatatcagccatggcttcccaccagcagttgcagcgcaagatgacggaactttgccaatgtcctgtgcacaggaatcagggatggatagacaccccgcggcctgcgccagcgcacgtataaatgtgtaa

SEQ ID NO: 949 - DNA, 855 bp, Artificial Sequence
  Modified Open Reading Frame
atggtatcaaaaggcgaggaattgtttactggtgtagtccctatcctcgttgaactggacggtgacgttaatggacacaaattttctgtctctggcgaaggagaaggcgatgctacttatgggaaacttactctaaaattcatatgcacgacaggcaaattgcctgtcccatggcctacgctcgtgaccacgttaacgtatggagtgcagtgcttcagcaggtatccagatcacatgaaacaacatgacttctttaaatcggctatgcccgaagggtatgtgcaggagcgaacaatcttctttaaagatgacggcaattacaagacaagagctgaagttaagtttgagggagatacgctagtcaaccgcatagaattgaagggtatagattttaaggaagacgggaacatactgggccataagcttgaatacaattataactcacacaacgtctacattatggcggataagcaaaagaatggaatcaaggtaaacttcaaaatacgacacaatattgaggacggatccgtgcagctagcagatcactaccagcagaatactcccatcggtgacgggccagtacttctgcccgacaaccattacttatccacccagtccgcactctcgaaggatcctaatgagaaacgagatcacatggtcctcttggaatttgttactgcagcaggcatcactctaggaatggatgagttgtacaaacggagtagagatatcagccatggcttcccaccagcagttgcagcgcaagatgacggaactttgccaatgtcctgtgcacaggaatcagggatggatagacaccccgcggcctgcgccagcgcacgtataaatgtgtaa

SEQ ID NO: 950 - DNA, 855 bp, Artificial Sequence
  Modified Open Reading Frame
atggtgtccaagggcgaggagctgttcaccggagtggtgcctatcctggtggagctggacggcgacgtgaacggccacaagtttagcgtgtccggcgagggcgaaggcgacgccacctacggcaagctgaccttgaagtttatctgtaccaccggcaaactgcccgtgccctggcccaccctcgtgacaacactgacctacggagtccagtgcttcagtagatatcctgatcatatgaagcagcacgacttcttcaagtccgcgatgcccgagggctacgtgcaggaaagaaccattttctttaaggacgacggaaactataagacaagagccgaggtgaagttcgagggagacaccctggtgaacagaatcgagctgaagggcatcgacttcaaagaggacggcaatattttgggccataaattggagtacaattataacagccataatgtgtacatcatggctgataaacagaagaatggtattaaggtgaactttaagattagacataacatagaagatggtagcgtgcagctcgccgatcactaccagcagaacacaccgatcggcgacggacccgtgctgctgcccgacaaccattatctgagtacccagagcgccctgtccaaggaccctaacgagaagagagatcacatggtgctgctcgagttcgtgaccgccgccggcatcaccctgggcatggacgagctgtataagagatcccgcgacatcagccacggctttcctccggcggtggctgctcaggacgacgggactcttccaatgagctgcgcccaggagtccggcatggacagacatcctgccgcctgtgccagcgccaggatcaacgtgtaa

SEQ ID NO: 951 - DNA, 855 bp, Artificial Sequence
  Modified Open Reading Frame
atggttagcaaaggagaggagctgtttactggcgtcgtacctatcctcgtcgagctagatggggacgtgaatggccataagttttctgtttcgggggagggagaaggcgacgctacttacgggaaactcactttgaaattcatatgcaccacgggcaagcttcccgtcccatggccaacgctcgtaacaaccctgacgtacggagtgcagtgcttctctcgctatccagatcatatgaagcagcatgatttttttaaatcagccatgccggaggggtatgttcaggagcgaaccatttttttcaaggacgatgggaactataagaccagggcagaagtgaagtttgaaggagacacgctagtaaaccgcatagaactaaaaggaatagattttaaggaggatggtaatatccttggacacaagctcgagtataattataacagtcataatgtgtacattatggcggataagcagaagaacggcatcaaggttaacttcaaaattcgccataacatcgaagatggatctgtgcaactcgcagatcattaccagcaaaatacccctattggcgacggtcccgttttactccccgacaatcattacctgagcacacagagtgctttgtcgaaggaccctaacgaaaaacgggatcatatggttttgttggagtttgtgactgccgcggggataaccttgggaatggacgagctgtataagcgctctagggacatctctcatggtttcccaccggctgtagcggcacaagacgacggcactctgcctatgtcctgtgcgcaagaaagtgggatggatcgccatccggccgcgtgtgcctccgcacgtataaatgtgtaa

SEQ ID NO: 952 - DNA, 855 bp, Artificial Sequence
  Modified Open Reading Frame
atggtgtcgaaaggagaggagctattcactggagtagttcctatccttgtcgagttggacggcgacgtgaacggacacaagttctcggtgtccggcgagggcgaaggtgacgccacgtacggtaagctgactctgaagttcatctgtaccacgggcaagctgcctgtgccgtggcctacgcttgtgactacgttgacgtacggagttcagtgcttcagtaggtacccggaccacatgaagcagcacgacttcttcaagtcggcgatgccggaggggtacgtgcaggaaagaacgatcttcttcaaagatgacgggaactacaagactcgtgccgaggtgaagttcgagggtgacaccctcgtcaaccgtatcgaattgaaggggatcgacttcaaggaggacgggaacatactggggcacaaactcgagtacaactacaatagtcacaacgtgtacatcatggcggacaagcagaagaacgggataaaggtgaacttcaagattcggcacaacatcgaggacgggtccgttcagctcgccgaccactaccagcagaacacgccgatcggggacggtccagtcctgctccctgacaatcattacctgtccactcagagtgctctgagtaaggaccctaatgagaagcgggaccacatggtcctgcttgagttcgtcaccgcggcgggaatcacgttggggatggacgagctgtacaagcggtctcgtgacatctcccacggattcccgccggcggtggcggcgcaggacgacggcacgctgccgatgtcctgcgctcaggagagcgggatggaccgtcacccggcggcgtgtgcgtctgcgcgtatcaacgtgtag

SEQ ID NO: 953 - DNA, 855 bp, Artificial Sequence
  Modified Open Reading Frame
atggtgtccaagggtgaggagttgttcaccggcgtggtgcctatcctggtggagctggacggcgacgtgaacggccacaagtttagcgtgtccggcgagggcgaaggcgacgccacctacggcaagctgaccctgaagttcatctgcaccaccggcaaactgcccgtgccctggcccaccctcgtgaccaccctgacctatggagtccagtgcttcagcagataccccgaccacatgaagcagcacgatttcttcaagtccgccatgcccgagggctacgtgcaggaaagaaccatcttctttaaggacgacggaaactataagaccagagccgaggtgaagttcgagggcgacaccctggtgaacagaatcgagctgaagggcatcgacttcaaagaggacggcaacatcctgggccacaaactggagtacaactacaatagtcacaacgtgtacatcatggccgacaagcagaagaatgggatcaaggtgaactttaagatcaggcacaacatcgaagacggcagcgtgcagctcgccgaccactaccagcagaacacacctattggtgacggacccgtgctgttgcctgataatcattacctgagcacccagagcgccctgtccaaggaccctaacgagaagagagatcacatggtgctgctcgagttcgtgaccgccgccggcatcaccctgggcatggacgagctgtacaagagatcccgcgacatcagccacggctttcctccggccgtggctgcccaggacgacgggaccctgcccatgagctgcgcgcaggagtccggcatggacagacatcccgccgcctgtgccagcgccaggatcaacgtgtaa

SEQ ID NO: 954 - DNA, 855 bp, Artificial Sequence
  Modified Open Reading Frame
atggtttcaaagggagaagagctcttcacgggggtggttccgatattagttgagttggatggcgatgtaaatggccataagttcagcgtatcgggcgaaggcgaaggcgatgcgacttatgggaaactaaccctaaagtttatttgtacaacaggtaaattgccggtgccatggccgactctagttactacactgacgtacggcgtgcagtgcttctctagatatcctgatcatatgaagcaacatgatttcttcaaatctgccatgccggagggatatgtacaggaacgaacgatttttttcaaagatgatggtaactataagactcgcgccgaagtcaaattcgaaggtgacacattggttaaccggatcgaattgaaagggattgatttcaaggaggatggcaatattctcgggcacaagctcgaatacaactacaattcccataacgtatatatcatggcggataaacaaaagaatgggatcaaagttaatttcaagattagacacaatattgaagacgggtcagtgcaattagcggatcactaccagcagaacaccccaatcggtgacggccccgtactacttcctgacaatcattacctgagtactcaatctgcgctctcgaaggacccgaatgagaaacgcgaccatatggtgctactcgagttcgtaaccgcggcgggaataaccctcggaatggacgagttgtacaaacgatcgagagatatctcacacggattcccaccggcggtagcagcgcaggatgacggtactctgccaatgtcttgtgcccaggagtcaggcatggataggcatcctgcggcttgcgcttcggctcgtatcaatgtgtaa

SEQ ID NO: 955 - DNA, 855 bp, Artificial Sequence
  Modified Open Reading Frame
atggtgagtaagggcgaagagctgttcaccggggtggtgcctatcctggtggagctggacggcgacgtgaacggccacaagtttagcgtgtccggcgagggcgaaggtgacgccacctacggcaagctgaccttgaagttcatctgtaccaccggcaaactgcccgtgccctggcccaccctggtgaccaccctcacctacggtgtccagtgcttcagtaggtaccccgaccacatgaagcagcacgacttcttcaagtccgccatgccggagggctacgttcaggaacgtaccatcttctttaaggacgatggtaactataagactcgggccgaggtgaagttcgagggagacaccttggtcaacagaatcgagcttaagggcatcgactttaaagaggatggtaacatcctgggccacaaactggagtacaactacaacagccacaacgtctacatcatggcggacaaacagaagaatggtatcaaggtgaactttaagatcagacacaacatcgaggacggctccgtgcagctcgctgatcattaccagcagaacacgcccatcggcgatgggcctgtactgctgcccgacaaccattatctgagcactcagagtgcgttgtcgaaggaccctaatgagaagcgagatcacatggtgctgctcgagttcgtgaccgccgcaggcatcaccctgggcatggacgagctttacaagaggtcccgcgacatcagccacggctttcctcccgccgtggccgcccaggacgacggaaccctgcccatgagctgcgcgcaggagtccggcatggacagacacccagccgcctgtgccagcgccaggatcaacgtctaa

SEQ ID NO: 956 - DNA, 855 bp, Artificial Sequence
  Modified Open Reading Frame
atggtgtccaagggtgaggagttgttcaccggcgtggtgcctatcctggtggagctggacggcgacgtgaacggccacaagtttagcgtgtccggcgagggcgaaggcgacgccacctacggcaagctgaccctgaagttcatctgcaccaccggcaaactgcccgtgccctggcccaccctcgtgaccaccctgacctacggagtccagtgcttcagcagataccccgaccacatgaagcagcacgacttcttcaagtccgccatgcccgagggctacgtgcaggaaagaaccatcttctttaaggacgacggaaactataagaccagagccgaggtgaagttcgagggagacaccctggtgaacagaatcgagctgaagggcatcgacttcaaagaggacggcaacatcctgggccacaaactggagtacaactacaacagccacaacgtgtacatcatggccgacaaacagaagaacgggatcaaggtgaactttaagatcagacacaacatcgaagacggcagcgtgcagctcgccgaccactaccagcagaacacacctattggtgacggacccgtgctgttgcctgataatcattacctgagcacccagagcgccctgtccaaggaccctaacgagaagagagatcacatggtgctgctcgagttcgtgaccgccgccggcatcaccctgggcatggacgagctgtacaagagatcccgcgacatcagccacggctttcctccggccgtggctgcccaggacgacgggaccctgcccatgagctgcgcgcaggagtccggcatggacagacatcccgccgcctgtgccagcgccaggatcaacgtgtaa

SEQ ID NO: 957 - DNA, 855 bp, Artificial Sequence
  Modified Open Reading Frame
atggtgtccaagggcgaggagctgttcaccggcgtggtgcctatcctggtggaactagacggcgacgtgaacggccacaagtttagcgtgtccggcgagggcgaaggcgatgccacctacggcaagctgaccctgaagttcatctgcaccacaggcaaactgcccgtgccctggcccaccctcgtgaccaccctgacctacggagtccaatgcttcagcagataccccgaccacatgaagcaacacgacttcttcaagtccgccatgcccgaaggctacgtccaggaaagaaccatcttctttaaggacgacggaaactataagaccagagccgaggtgaagttcgagggagacaccctggtgaacagaatcgagctgaagggcatcgacttcaaagaggacggcaacatcctgggccacaaactggagtacaactacaacagccacaacgtctacatcatggccgacaaacagaagaacgggatcaaggtgaactttaagatcagacataatatcgaagacggcagcgtgcagctcgccgaccactaccagcagaacacacccatcggcgacggacccgtgctgctgcccgacaatcattacctgagcacccagagcgccctatccaaggaccctaacgagaagagagatcacatggtgctgctcgagttcgtgaccgccgccggcatcaccctgggcatggacgagctgtacaagagatcccgcgacatcagccacggctttcctcccgccgtggccgcccaagacgacgggaccctgcccatgagctgcgcccaggagtccggcatggacagacaccccgccgcctgtgccagcgccaggatcaacgtataa

SEQ ID NO: 958 - DNA, 855 bp, Artificial Sequence
  Modified Open Reading Frame
atggtgtccaagggcgaggagctgttcaccggcgtggtgcctatcctggtggagctggacggcgacgtgaacggccacaagtttagcgtgtccggcgagggcgaaggcgacgccacctacggcaagctgaccctgaagttcatctgcaccacaggcaaactgcccgtgccctggcccaccctcgtgaccaccctgacctacggagtccaatgcttcagcagataccccgaccacatgaagcaacacgacttcttcaagtccgccatgcccgaaggctacgtccaggaaagaaccatcttctttaaggacgacggaaactataagaccagagccgaggtgaagttcgagggagacaccctggtgaacagaatcgagctgaagggcatcgacttcaaagaggacggcaacatcctgggccacaaactggagtacaactacaacagccacaacgtctacatcatggccgacaaacagaagaacgggatcaaggtgaactttaagatcagacacaacatcgaagacggcagcgtgcagctcgccgaccactaccagcagaacacacccatcggcgacggacccgtgctgctgcccgacaaccattacctgagcacccagagcgccctgtccaaggaccctaacgagaagagagatcacatggtgctgctcgagttcgtgaccgccgccggcatcaccctgggcatggacgagctgtacaagagatcccgcgacatcagccacggctttcctcccgccgtggccgcccaagacgacgggaccctgcccatgagctgcgcccaggagtccggcatggacagacaccccgccgcctgtgccagcgccaggatcaacgtataa

SEQ ID NO: 959 - DNA, 855 bp, Artificial Sequence
  Modified Open Reading Frame
atggtgtccaagggcgaggagctgttcaccggcgtggtgcctatcctggtggagctggacggcgacgtgaacggccacaagtttagcgtgtccggcgagggcgaaggcgacgccacctacggcaagctgaccctgaagttcatctgcaccacaggcaaactgcccgtgccctggcccaccctcgtgaccaccctgacctacggagtacagtgcttcagcagataccccgaccacatgaagcagcacgacttcttcaagtccgccatgcccgaaggctacgtccaggaaagaaccatcttctttaaggacgacggaaactataagaccagagccgaggtgaagttcgagggagacaccctggtgaacagaatcgagctgaagggcatcgacttcaaagaggacggcaacatcctgggccacaaactagagtacaactacaacagccacaacgtctacatcatggccgacaaacagaagaacgggatcaaggtgaactttaagatcagacacaacatcgaagacgggagcgtgcagctcgccgaccactaccagcagaacacacccatcggcgacggacccgtgctgctacccgacaaccattacctgagcacccagagcgccctgtccaaggaccctaacgagaagagagatcacatggtgctgctcgagttcgtgaccgccgccggcatcaccctgggcatggacgagctgtacaagagatcccgcgacatcagccacggctttcctcccgccgtggccgcccaagacgacgggaccctgcccatgagctgcgcccaggagtccggcatggacagacaccccgccgcctgtgccagcgccaggatcaacgtgtaa

SEQ ID NO: 960 - DNA, 855 bp, Artificial Sequence
  Modified Open Reading Frame
atggtgtccaagggcgaggagctgttcaccggcgtggtgcctatcctggtggagctggacggcgacgtgaacggccacaagtttagcgtgtccggcgagggcgaaggcgacgccacctacggcaagctgaccctgaagttcatctgcaccaccggcaaactgcccgtgccctggcccaccctcgtgaccaccctgacctacggagtccaatgcttcagcagataccccgaccacatgaagcagcacgacttcttcaagtccgccatgcccgaaggctacgtccaggaaagaaccatcttctttaaggacgacggaaactataagaccagagccgaggtgaagttcgagggagacaccctggtgaacagaatcgagctgaagggcatcgacttcaaagaggacggcaacatcctgggccacaaactggagtacaactacaacagccacaacgtctacatcatggccgacaaacagaagaacgggatcaaggtgaactttaagatcagacacaacatcgaagacggcagcgtgcagctcgccgaccactaccagcagaacacacccatcggcgacggacccgtactgctgcccgacaaccattacctgagcacccagagcgccctgtccaaggaccctaacgagaagagagatcacatggtgctgctcgagttcgtgaccgccgccggcatcaccctgggcatggacgagctgtacaagagatcccgcgacatcagccacggctttcctcccgccgtggccgcccaagacgacgggaccctgcccatgagctgcgcccaggagtccggcatggacagacaccccgccgcctgtgccagcgccaggatcaacgtgtaa

SEQ ID NO: 961 - DNA, 855 bp, Artificial Sequence
  Modified Open Reading Frame
atggtgtccaagggcgaggagctgttcaccggcgtggtgccaatcctggtggagctggacggcgacgtgaacggccacaagtttagcgtgtccggcgagggcgaaggcgacgccacctacggcaagctgaccctcaaattcatctgcaccaccggcaaactgcccgtaccgtggcccaccctggtgaccaccctgacctacggagtccagtgcttcagcagatacccagaccacatgaaacagcacgacttcttcaagtcggccatgcccgaggggtacgtgcaagaaagaaccatcttctttaaggacgacggaaactacaagacgagagccgaggtgaagttcgagggggacaccctggtgaaccgaatcgagctgaagggcatcgacttcaaggaggacggcaacatcctgggccacaaactggaatacaactacaacagccataacgtatacatcatggccgacaaacagaagaacgggatcaaagtgaactttaagatccgacacaacatcgaagacggcagcgtgcagctcgccgaccactaccagcagaacacacccatcggcgacggacccgtgctgctgcccgacaaccattacctgagcacccaaagcgccctgtccaaagacccaaacgagaagagagatcacatggtgctgctcgagttcgtgaccgccgccggcatcaccctcggcatggacgagctgtacaagagatcacgcgacatcagccacggctttcctccagccgtggcggcccaggacgacgggaccctgcccatgagctgtgcccaagaatccggcatggacagacatcccgccgcctgtgccagcgccaggatcaacgtgtaa

SEQ ID NO: 962 - DNA, 855 bp, Artificial Sequence
  Modified Open Reading Frame
atggtgtccaagggcgaggagctgttcaccggcgtggtgccaatcctggtggagctggacggcgacgtgaacggccacaagtttagcgtgtccggcgagggcgaaggcgacgccacctacggcaagctgaccctcaaattcatctgcaccaccggcaaactgcccgtaccgtggcccaccctcgtgaccaccctgacctacggagtccagtgcttcagcagataccccgaccacatgaaacagcacgacttcttcaagtccgccatgcccgaggggtacgtgcaagaaagaaccatcttctttaaggacgacggaaactataagacgagagccgaggtgaagttcgagggagacaccctggtgaaccgaatcgagctgaagggcatcgacttcaaggaggacggcaacatcctgggccacaaactggaatacaactacaacagccataacgtatacatcatggccgacaaacagaagaacgggatcaaagtgaactttaagatccgacacaacatcgaagacggcagcgtgcagctcgccgaccactaccagcagaacacacccatcggcgacggacccgtgctgctgcccgacaaccattacctgagcacccaaagcgccctgtccaaagacccaaacgagaagagagatcacatggtgctgctcgagttcgtgaccgccgccggcatcaccctcggcatggacgagctgtacaagagatcacgcgacatcagccacggctttcctccagccgtggcggcccaggacgacgggaccctgcccatgagctgcgcccaagagtccggcatggacagacatcccgccgcctgtgccagcgccaggatcaacgtgtaa

SEQ ID NO: 963 - DNA, 855 bp, Artificial Sequence
  Modified Open Reading Frame
atggtttctaagggcgaggagctgtttacgggcgtcgttcccatcctcgtggagctagacggagacgttaacggtcataagttctcggtttccggtgagggtgagggggacgccacgtacggcaagctcacattgaagttcatatgtaccacgggtaagctacctgtgccgtggcccaccctcgtgactaccctcacgtacggtgtccagtgtttctcgcgctacccggaccatatgaagcagcacgacttcttcaagtccgcgatgcccgagggctacgtccaggagcgcacaatcttcttcaaagacgatggaaactacaagactcgtgcggaggtgaagttcgagggcgataccctggtgaaccgaatcgagctgaaaggcatcgattttaaggaggatggtaacatcctgggtcacaagttggagtacaactacaactcccataatgtctatattatggcggataagcagaagaatggcattaaggttaacttcaagatccgccataatatagaggacgggtccgttcagctggccgatcactaccagcagaacacacccatcggcgacggacccgtactgctgccggacaatcactacttgtccacgcagtccgcgctctcaaaggaccccaatgagaagcgcgatcacatggtcctgctagagttcgtcacagccgcagggataaccctgggcatggacgaactctacaaacgctcgcgcgacatctcccacggctttccaccggccgttgcggcgcaggacgatgggacactccccatgtcctgcgcgcaggagtccggcatggatagacatcctgccgcttgcgcgagcgccaggatcaacgtgtga

SEQ ID NO: 964 - DNA, 855 bp, Artificial Sequence
  Modified Open Reading Frame
atggtgtcaaaaggggaggaactgttcaccggggtggtgccaatactggtggaactggacggagacgtgaacggccacaaattctctgtgtctggcgagggcgagggcgacgccacgtacggcaagctgacactgaagttcatctgcaccacaggcaagctgcccgtgccctggcccaccctggtgaccaccctaacctatggcgtgcaatgcttctctcgatatcccgaccacatgaagcagcacgatttcttcaaatcagccatgcccgagggctacgtgcaggagaggaccatcttcttcaaagacgacggaaactacaagaccagggccgaagtaaagttcgaaggggacaccctggtgaaccggatcgagctgaaaggcatcgacttcaaagaggacggcaacatcctgggacataaactggagtataattataactctcataacgtgtatataatggcagacaagcagaagaacggcatcaaggtgaacttcaagatccgccacaacattgaggacggatctgtgcaactggccgaccattaccagcagaacacccccatcggcgacggcccagtgctgctgcccgataaccactacctctctacccagtctgccttgtctaaggaccccaacgagaagcgggaccacatggtcctgctggagttcgtaaccgccgccggaatcaccctgggcatggacgagctgtacaagagatcccgagacatcagccacggctttcctcccgccgtggccgcccaagacgacgggacgctgcccatgagctgcgcacaagagtccggcatggacagacacccagccgcctgtgccagcgccaggatcaacgtgtaa

SEQ ID NO: 965 - DNA, 855 bp, Artificial Sequence
  Modified Open Reading Frame
atggtgtcaaaaggggaggaactgttcaccggggtggtgccaatactggtggaactggacggagacgtgaacggccacaaattctctgtgtctggcgagggcgagggcgacgccacgtacggcaagctgacactgaagttcatctgcaccacaggcaagctgcccgtgccctggcccaccctggtgaccaccctaacctacggcgtgcaatgcttctctcgatatcccgaccacatgaagcagcacgatttcttcaaatcagccatgcccgagggctacgtgcaggagaggaccatcttcttcaaagacgacggaaactacaagaccagggccgaagtaaagttcgaaggggacaccctggtgaaccggatcgagctgaaaggcatcgacttcaaagaggacggcaacatcctgggacataaactggagtataattataactctcataacgtgtatataatggcagacaagcagaagaacggcatcaaggtgaacttcaagatccgccacaacattgaggacggatctgtgcaactggccgaccattaccagcagaacacccccatcggcgacggcccagtgctgctgcccgataaccactacctctctacccagtctgccttgtctaaggaccccaacgagaagcgggaccacatggtcctgctggagttcgtaaccgccgccggaatcaccctgggcatggacgagctgtacaagagatcccgagacatcagccacggctttcctcccgccgtggccgcccaagacgacgggacgctgcccatgagctgcgcccaagagtccggcatggacagacacccagccgcctgtgccagcgccaggatcaacgtgtaa

SEQ ID NO: 966 - DNA, 855 bp, Artificial Sequence
  Modified Open Reading Frame
atggtttcgaaaggcgaagaactcttcacaggcgttgtgccgattctcgtggagcttgacggagatgtgaacggtcacaagttctccgtcagcggcgagggcgagggggatgcgacctatggtaagctgaccttgaaattcatatgcaccacgggaaagctcccggtcccttggccaacgttagtcaccactttgacttacggggtacagtgctttagcaggtaccccgaccatatgaaacagcatgacttttttaagtctgctatgcctgaaggatatgtccaagaacggaccatattcttcaaggacgatggtaattataagacccgtgccgaggtcaagttcgagggtgacacgttggtcaacaggatagaattaaagggcatagatttcaaggaagacggcaatatcttaggtcacaagctagagtataattacaatagccataacgtttatataatggccgacaagcagaaaaatgggataaaggttaacttcaagatcaggcataacatagaggacgggtccgtccagttggcggatcattatcaacagaacacgccaattggggacggacccgtcctcttgcctgataaccattatttatccacacagtctgcgttgtcgaaggatcccaacgagaagcgcgatcatatggtgcttctcgagttcgtcactgccgcagggataaccctgggcatggacgaactgtataaacggagccgtgacattagtcacggctttccccccgccgtcgccgcgcaagacgacggaacacttccgatgtcttgcgcgcaagaaagcgggatggaccgccatcccgctgcttgcgcctccgcgagaatcaacgtctga

SEQ ID NO: 967 - DNA, 855 bp, Artificial Sequence
  Modified Open Reading Frame
atggtgtctaaaggggaggaactgttcaccggggtggtgccaatactggtggaactggacggagacgtgaacggccacaaattctctgtgtctggcgagggcgagggcgacgccacgtacggcaagctgacactgaagttcatctgcaccacaggcaagctgcccgtgccctggcccaccctggtgaccaccctaacctacggcgtgcaatgcttctctcgatatcccgaccacatgaagcagcacgatttcttcaaatcagccatgcccgagggctacgtgcaggagaggaccatcttcttcaaagacgacggaaactacaagaccagggccgaagtaaagttcgaaggggacaccctggtgaaccggatcgagctgaaaggcatcgacttcaaagaggacggcaacatcctgggacataaactggagtataattataactctcataacgtgtatataatggcagacaagcagaagaacggcatcaaggtgaacttcaagatccgccacaacattgaggacggatctgtgcaactggccgaccattaccagcagaacacccccatcggcgacggcccagtgctgctgcccgataaccactacctctctacccagtctgccttgtctaaggaccccaacgagaagcgggaccacatggtcctgctggagttcgtaaccgccgccggaatcaccctgggcatggacgagctgtacaagagatcccgagacatcagccacggctttcctcccgccgtggccgcccaagacgacgggaccctgcccatgagctgcgcccaagagtccggcatggacagacacccagccgcctgtgccagcgccaggatcaacgtgtaa

SEQ ID NO: 968 - DNA, 855 bp, Artificial Sequence
  Modified Open Reading Frame
atggttagcaagggcgaagagctgttcactggggtcgttccgatacttgttgagctggatggagacgtgaacgggcataagttcagcgtctccggcgagggagagggggacgctacctacggcaagttgactctaaagttcatttgcacgacaggtaagctccccgtcccctggccgacgcttgtgaccaccttgacgtatggcgttcaatgctttagtcggtatcccgaccacatgaagcagcatgacttcttcaagtcggctatgcccgagggctatgtgcaggagaggaccatcttcttcaaagacgacggcaactataagactagggccgaagtcaagtttgaaggagacaccctggtcaaccgcatagagctcaagggcatagacttcaaggaggacggtaatatactcgggcacaagctcgagtataattacaactcccataatgtatacattatggccgacaagcagaagaacggcatcaaggtgaatttcaagatacgtcacaatatcgaagacggatcggtccagctggcagatcactaccagcagaacacaccgataggtgatggaccggtccttcttcctgacaatcattacttgtcaacccagtcagcattgtcgaaggaccccaacgagaagcgcgatcacatggtgcttctcgaatttgtcacagcggcgggaatcacattggggatggacgagttgtacaagcgatctcgtgacatctcccatggattcccgccggctgtggcagcgcaggacgatgggacacttcccatgtcctgcgcgcaggagagcgggatggaccgccatcccgctgcttgtgcgagtgcgcggataaatgtatag

SEQ ID NO: 969 - DNA, 855 bp, Artificial Sequence
  Modified Open Reading Frame
atggtgtctaaaggcgaggagctgttcaccggggtggtgccaatcctggtggagctggacggagacgtgaacggccacaaattctctgtgtctggcgagggcgagggcgacgccacctacggcaagctgaccctgaagttcatctgcaccaccggcaagctgcccgtgccctggcccaccctggtgaccaccctgacctacggcgtgcaatgcttctctcgatatcccgaccacatgaagcagcacgatttcttcaagtcagccatgcccgagggctacgtgcaggagaggaccatcttcttcaaagacgacggaaactacaagaccagggccgaagtaaagttcgaaggggacaccctggtgaaccggatcgagctgaaaggcatcgacttcaaagaggacggcaacatcctgggacataaactggagtataattataactctcataacgtgtatataatggcagacaagcagaagaacggcatcaaggtgaacttcaagatccgccacaacattgaggacggatctgtgcaactggccgaccattaccagcagaacacccccatcggcgacggcccagtgctgctgcccgataaccactacctctctacccagtctgccttgtctaaggaccccaacgagaagcgggaccacatggtcctgctggagttcgtaaccgccgccggaatcaccctgggcatggacgagctgtacaagagatcccgcgacatcagccacggctttcctcccgccgtggccgcccaagacgacgggaccctgcccatgagctgcgcccaggagtccggcatggacagacacccagccgcctgtgccagcgccaggatcaacgtgtaa

SEQ ID NO: 970 - DNA, 855 bp, Artificial Sequence
  Modified Open Reading Frame
atggtgtctaaaggcgaggagctgttcaccggggtggtgccaatcctggtggagctggacggagacgtgaacggccacaaattctctgtgtctggcgagggcgagggcgacgccacctacggcaagctgaccctgaagttcatctgcaccaccggcaagctgcccgtgccctggcccaccctggtgaccaccctgacctacggcgtgcaatgcttctctcgatatcccgaccacatgaagcagcacgacttcttcaagtcagccatgcccgagggctacgtgcaggagaggaccatcttcttcaaggacgacggaaactacaagaccagggccgaggtaaagttcgaaggggacaccctggtgaaccggatcgagctgaaaggcatcgacttcaaagaggacggcaacatcctgggacacaaactggagtataattataactctcataacgtgtatatcatggccgacaagcagaagaacggcatcaaggtgaacttcaagatccgccacaacattgaggacggatctgtgcaactggccgaccattaccagcagaacacccccatcggcgacggcccagtgctgctgcccgataaccactacctctctacccagtctgccttgtctaaggaccccaacgagaagcgggaccacatggtcctgctggagttcgtgaccgccgccggaatcaccctgggcatggacgagctgtacaagagatcccgcgacatcagccacggctttcctcccgccgtggccgcccaagacgacgggaccctgcccatgagctgcgcccaggagtccggcatggacagacacccagccgcctgtgccagcgccaggatcaacgtgtaa

SEQ ID NO: 971 - DNA, 855 bp, Artificial Sequence
  Modified Open Reading Frame
atggtttctaagggcgaggagctgtttacgggcgtcgttcccatcctcgtggagctagacggagacgttaacggtcataagttctcggtttccggtgagggtgagggggacgccacgtacggcaagctcacattgaagttcatatgtaccacgggtaagctacctgtgccgtggcccaccctcgtaactaccctcacgtacggtgtccagtgtttctcgcgctacccggaccatatgaagcagcacgacttcttcaagtccgcgatgcccgagggctacgtccaggagcgcacaatcttcttcaaagacgatggaaactacaagactcgtgcggaggtgaagttcgagggcgataccctggtgaaccgaatcgagctgaaaggcatcgattttaaggaggatggtaacatcctgggtcacaagttggagtacaactacaactcccataatgtctatattatggcggataagcagaagaatggcattaaggttaacttcaagatccgccataatatagaggacgggtccgttcagctggccgatcactaccagcagaacacacccatcggcgacggacccgtactgctgccggacaatcactacttgtccacgcagtccgcgctctcaaaggaccccaatgagaagcgcgatcacatggtcctgctagagttcgtgacagccgcagggataactctgggcatggacgaactctacaaacgctcgcgcgacatctcccacggctttccaccggccgttgcggcgcaggacgatgggacactccccatgtcctgcgcgcaggagtccggcatggatagacatcctgccgcttgcgcgagcgccaggatcaacgtgtga

SEQ ID NO: 972 - DNA, 855 bp, Artificial Sequence
  Modified Open Reading Frame
atggtatcaaaaggggaggagctgttcacaggcgtggtgccgatcctcgtcgagctcgacggagatgtcaatggtcacaagttttcggtcagcggggagggggagggtgatgccacctatggcaagctcaccctcaagtttatctgtactacaggtaaactccccgtcccctggccgacgcttgtgaccactttgacatatggagttcaatgcttcagccggtatcctgaccacatgaagcagcacgacttcttcaagtcagccatgccagagggttatgttcaggagcgcacgatctttttcaaggacgacggaaattataagactcgtgcggaggttaaattcgagggagatacgctggtgaatcggatcgagttgaagggaatcgacttcaaggaagatggcaatatcttagggcataagctggagtacaactataattcgcataacgtctatataatggcggataagcagaagaatggtattaaggtgaactttaagatacgccataacattgaagacggttccgttcaactcgccgatcattaccagcagaacacgcccatcggggatgggcctgttcttctccccgataaccactacctgagcacccagtccgcgctgtcaaaggaccccaacgagaagcgtgaccacatggttctcttggagttcgtgacagcggctgggataaccctcggcatggatgagttgtataagaggtcgagggacatcagccatggtttccctcctgccgtcgccgctcaggacgacggcacgctgcccatgtcatgtgctcaggagtccggcatggatcggcacccagccgcctgtgcatcagctcgtattaatgtataa

SEQ ID NO: 973 - DNA, 855 bp, Artificial Sequence
  Modified Open Reading Frame
atggtcagcaaaggagaggagctcttcacaggggttgtgccaatccttgtggagctcgacggagacgtaaatggccacaagtttagcgtgagtggagaaggtgagggtgacgccacctatggcaagctaacactgaagttcatctgtacgacagggaagttaccagtgccgtggccgacactggtgactaccctgacgtacggagttcagtgttttagccgttaccctgaccacatgaagcagcatgacttcttcaagtccgccatgcctgaaggctatgtgcaagagcgtaccatcttctttaaagacgacggcaactataaaactagggccgaagtcaaatttgaaggcgatacccttgtcaatcgaatcgagctcaagggtatcgacttcaaggaagatggtaatattctaggacacaaactagaatataattacaactcgcacaatgtctacatcatggcggacaagcagaagaacggtattaaggtgaatttcaagattcgccataatatcgaagacggctctgtacagctggccgatcactatcagcaaaatacgccgataggtgatgggcccgtcctactcccagataatcactacctcagtactcaatcagcactatctaaggatcccaatgagaagagggatcacatggtgctgcttgagtttgtgactgcggctgggattactctgggaatggacgagctgtacaagcggtctcgcgatatttcgcacggttttccacccgctgtggccgcccaggatgacgggacactcccgatgtcctgtgctcaggagtcgggaatggaccgtcatcctgcggcttgcgcctccgctcgtattaatgtatga

SEQ ID NO: 974 - DNA, 855 bp, Artificial Sequence
  Modified Open Reading Frame
atggtaagcaaaggagaagagctgttcactggggtagtgcccatattggtggagctggacggggacgtaaacggccacaagttctccgtgtccggagaaggagaaggcgacgccacctatggcaagcttacgctgaaatttatctgcaccacaggcaaactgcctgtgccgtggccgaccctcgtgaccactctcacctatggggtgcagtgcttcagtcggtaccccgatcacatgaagcaacatgactttttcaagtcggccatgcccgagggctacgtccaggagcggaccatattctttaaagacgatggcaattacaagactcgggccgaggtgaagttcgagggagacaccttggtgaaccggatcgagctgaagggcatcgactttaaggaagatggcaacatcctgggccacaagctcgagtacaactacaactcgcacaacgtgtacatcatggccgacaagcagaagaatggcatcaaggtcaacttcaagattcggcacaatattgaggacgggtctgtgcaactcgctgatcactaccagcagaacacgcccataggcgacggaccagtgttactgcccgacaaccattacttgtcgacgcagtccgcgctttcgaaggatcccaacgaaaagcgtgatcacatggtcctgctggagttcgttacagctgcagggatcaccttgggcatggacgagttgtacaagagatctcgtgacatcagccacggctttcctccagccgtggccgcacaggacgatggcaccctgccaatgtcctgtgcccaggagagcggcatggacaggcatcctgccgcctgtgccagtgcgaggataaatgtctaa

SEQ ID NO: 975 - DNA, 855 bp, Artificial Sequence
  Modified Open Reading Frame
atggttagcaaaggagaagaattatttacgggcgtggtgcctattttggtggagctggacggcgacgtgaacggacacaagttctcggtgtcgggcgagggcgagggcgacgccacctacgggaagcttaccctgaagttcatctgcactacgggtaagcttcccgtgccctggcccaccttagtgaccaccctcacctatggcgtgcagtgcttcagtcggtaccccgaccacatgaagcagcacgacttcttcaagtcggccatgcccgagggctatgtccaagagcgtaccatcttctttaaagacgatggcaattacaagacccgggccgaggtgaagttcgagggcgacaccttggtgaaccggatcgagctaaagggcatcgactttaaagaagatggtaacattcttggacataagctcgagtataattataactcgcacaatgtgtatatcatggccgacaagcagaagaacggaatcaaagtgaactttaagatccgtcacaacatcgaggacgggtccgttcagctcgccgaccactaccagcagaatacaccaataggagacggacccgtcttactgccagacaatcactatttatcaacacagagtgcactatctaaggacccgaacgagaagcgggaccacatggtgctgctagagttcgtcaccgccgcgggtatcaccctcggcatggacgagctctacaaaagatcccgggacatcagccacggctttcctccagccgtggctgcgcaggacgacgggacgctgcccatgagctgcgcccaggagtccggcatggacaggcaccccgctgcctgtgccagtgccaggatcaatgtgtag

SEQ ID NO: 976 - DNA, 855 bp, Artificial Sequence
  Modified Open Reading Frame
atggtttcaaagggcgaagaactcttcacaggcgttgttccgattctagtagaactagacggagatgtgaatggtcacaaattctccgtcagtggcgagggtgagggggacgctacatatggaaagcttacgcttaaattcatatgtacgacggggaagctccccgtcccctggcccaccctcgtcacgaccctcacctacggcgtgcagtgttttagccgataccctgatcacatgaagcagcatgatttcttcaagtccgccatgcccgagggttatgtccaagagcgtaccatcttctttaaagacgacggcaactataaaactagggccgaagtcaagttcgagggtgacacacttgtcaaccgcatcgaactgaaggggatagacttcaaagaagatggtaacattcttggacataaactcgagtataattataactcgcataacgtgtatataatggcggacaagcagaaaaacggtatcaaggttaacttcaaaattagacataatattgaagatgggtcagtacagcttgctgaccactatcaacagaacacgccgataggtgacggtccggtattattaccggataatcattacttatcgacgcaaagcgcgttgagtaaggacccgaacgaaaagcgggaccacatggttctactagagttcgtgaccgccgcgggaattaccctggggatggatgagctctataagaggagccgagacatctcccatgggttcccgccggcggtcgcggcgcaggacgatgggacccttcccatgtcctgcgcgcaggagagcgggatggaccgccatcccgctgcctgcgcctcggctcggatcaacgtctga

SEQ ID NO: 977 - DNA, 855 bp, Artificial Sequence
  Modified Open Reading Frame
atggtcagtaaaggggaggaactattcacaggagtagttcctatattagtcgaactagacggggatgtgaacggacataagttcagtgtgtcgggggagggtgagggcgacgcgacgtacggtaaacttacccttaagtttatctgtacgacgggcaagctgcccgtcccgtggcccaccctcgtgactacactgacttacggagtgcagtgtttcagtcgctaccccgaccacatgaagcagcatgacttttttaagtctgctatgcccgagggttacgtgcaggaacgtaccatcttctttaaagacgatggcaactacaaaacccgagctgaagtcaagttcgagggcgatacgctcgtgaaccggattgagctcaagggcatcgactttaaagaagatgggaacatcctcgggcataagttagaatataactacaacagccataatgtatacattatggctgataagcagaaaaatggcataaaagtcaatttcaaaataaggcacaacatagaagatgggagcgtccagctggcggaccactaccagcagaataccccgataggggatggtcctgtgctgctgccagataaccattatctgagcacgcaaagtgcgctgtcaaaagacccgaacgaaaagcgggaccacatggtcctgcttgagttcgtgacagccgcgggcataaccctgggtatggacgagctgtataagcgcagccgggacatatcccatgggtttccgcccgcggtagcagcacaggacgatgggacgctcccaatgtcgtgcgcacaggaaagcgggatggatcgccatcccgctgcctgtgcgtccgctcgcatcaacgtctag

SEQ ID NO: 978 - DNA, 855 bp, Artificial Sequence
  Modified Open Reading Frame
atggtgagcaagggggaggagttgtttacgggcgttgtgcccatcctcgtcgagctcgacggggatgtcaatgggcacaagttcagcgtatcgggggagggagagggagatgccacgtacgggaagcttaccctgaagttcatatgtactacagggaagcttcccgtaccgtggccaaccctggtcacgaccctaacatatggggtccagtgtttcagtaggtatccagatcacatgaagcagcatgacttctttaaatctgcaatgcccgaaggatacgtccaagaaaggacgatattcttcaaggacgatgggaattacaagactcgcgctgaagttaaatttgagggcgatactcttgtgaatcgcatcgaacttaagggcatagatttcaaagaagatggaaacatactgggacacaagttagagtataactataactctcacaacgtctatataatggccgataagcagaagaatggcattaaagtcaattttaagattcggcacaatatagaagacgggtccgttcagctagcggaccactaccagcagaacacacccattggtgatggtccggtattattaccggacaatcactacctcagcacacaaagtgcgctgagtaaggaccctaatgagaaaagggaccacatggttctgctggagtttgtgaccgctgctggcattacgctaggtatggatgagctatacaagcggtcacgtgacatctcccacggtttccctcccgcggtcgctgcgcaagacgatgggacacttcccatgtcttgcgcacaagagtcggggatggaccgtcacccggctgcttgtgcgagcgcccgtatcaacgtctga

SEQ ID NO: 979 - DNA, 855 bp, Artificial Sequence
  Modified Open Reading Frame
atggttagcaagggagaagagctgttcactggggtcgttccgatacttgttgagctggatggagacgtgaacgggcataagttcagcgtctccggcgagggagagggggacgctacctacggcaagttgacgctaaagttcatttgcacgacaggtaagctccccgtcccctggccgacgcttgtgaccaccttgacgtatggcgttcaatgctttagtcggtatcccgaccacatgaagcagcatgacttcttcaagtcggctatgcccgagggctatgtgcaggagaggaccatcttcttcaaagacgacggcaactataagactagggccgaagtcaagtttgaaggagacaccctggtcaaccgcatagagctcaagggcatagacttcaaggaggacggtaatatactcgggcacaagctcgagtataattacaactcccataatgtatacattatggccgacaagcagaagaacggcatcaaggtgaatttcaagatacgtcacaatatcgaagatggatcggtccagctggcagatcactaccagcaaaacacaccgataggtgatggaccggtccttcttcctgacaatcattatttgtcaacccagtcagcattgtcgaaggaccccaacgagaagcgcgatcacatggtgcttctcgaatttgtcacagcggcgggaatcacattggggatggacgagttgtacaagcgatctcgtgacatctcccatggattcccgccggctgtggcagcgcaggacgatgggacacttcccatgtcctgcgcgcaggagagcgggatggaccgccatcccgctgcttgtgcgagtgcgcggatcaatgtatag

SEQ ID NO: 980 - DNA, 855 bp, Artificial Sequence
  Modified Open Reading Frame
atggtatcgaaaggggaggagctattcacgggcgtcgtcccgattcttgtcgaattggacggcgacgtgaatggccacaagtttagtgtgagcggcgagggggagggcgacgctacctacggcaaattgacgctcaagtttatttgcacgacgggtaagttgcccgtcccctggccgactctagtgacgaccctgacttacggggtccagtgcttttctaggtacccggaccatatgaaacaacatgacttctttaagagtgctatgcccgagggctatgttcaggagaggactatcttcttcaaagacgacggcaactataaaactagggccgaagtcaagtttgaaggagatactcttgtcaatcgaatagagctcaagggcatagactttaaagaagatggtaatatactcgggcacaagctcgagtataattacaactcgcacaacgtctatattatggcggataagcagaagaatggcataaaagtcaacttcaagatccgccataatatagaggacggtagtgtgcaactggccgatcactatcagcagaacactcctattggtgatgggccagtgctactaccggataatcactatttatccactcagtcggctctgtccaaagatccgaatgagaagcgagatcatatggtgttactagagttcgtcacggctgcagggatcacgcttggtatggatgagctatacaagcggagccgtgacattagtcacggctttccgcctgccgtcgctgcacaagacgatggaactcttccaatgtcttgtgctcaagagagcggcatggacaggcaccctgcagcctgtgcgagtgctcgcattaacgtgtga

SEQ ID NO: 981 - DNA, 855 bp, Artificial Sequence
  Modified Open Reading Frame
atggtttcaaagggagaagagctgttcaccggcgtggtgcccatcttggtggagctggacggcgatgtgaatggacacaagttctccgtatcgggggagggcgagggcgacgcgacgtacgggaagcttaccctgaagttcatctgcactacgggtaagcttcctgtgccctggcccactttggtaaccacactgacgtacggcgtgcagtgcttctcgcggtatcctgaccatatgaagcagcacgacttcttcaagtcggcgatgcctgagggttatgtccaggaacgtaccatcttctttaaggacgatggcaattacaagacccgggccgaggtgaagttcgagggcgacaccttggtgaaccggatcgagctgaagggcatcgactttaaggaggatggtaatatcctgggccacaagttggaatacaactataactctcacaatgtctacatcatggcagacaagcagaagaatggtatcaaagtgaacttcaagatccgacacaacatagaggacgggtccgttcagctcgccgaccactaccagcaaaatacgccgattggggacgggccagtgctgttacccgacaatcactacctgtcgactcagtcggcactgtcaaaagatcccaacgagaagcgtgatcacatggttctgttggagtttgtgacggcggcgggcatcacgctgggcatggacgagctctataaacgctcccgcgacatcagccacggctttcctccagccgtggctgcgcaggacgacgggaccctgcccatgagctgcgcacaggagtccggcatggacagacacccagccgcctgtgccagcgctaggatcaacgtctaa

SEQ ID NO: 982 - DNA, 855 bp, Artificial Sequence
  Modified Open Reading Frame
atggtatcaaagggtgaggagttgttcactggcgtcgtaccaatattggtcgagcttgacggggacgtcaacgggcacaagttctcggtcagcggggaaggtgagggtgacgcgacgtacggtaaacttacacttaagtttatctgtacgacaggaaaacttcctgtcccctggccgacactggtcaccacgctaacgtatggtgtccagtgtttttcgcgttaccctgaccacatgaagcagcacgacttcttcaagtcggccatgccagagggctacgtgcaggagcgtaccatcttctttaaagacgatggcaactataagactcgagcggaagtcaaattcgagggggataccctcgtgaaccgcatcgagcttaagggcatcgactttaaagaagatggtaacatcttgggccacaagttggagtacaactacaatagccataatgtctacattatggctgataagcagaagaatggcattaaggttaattttaagatccgtcacaacattgaggacggatctgttcaacttgctgatcattatcagcagaacactccaataggagatggtcccgtgcttctcccggataaccactatttgtcaacgcaatctgcgttgtcaaaggatccgaatgagaagcgggaccatatggtcctattggagttcgtgactgcggctggaataaccctggggatggacgagttgtataagcgatctcgtgacatctcccacgggtttccacccgcagtcgcggcccaagatgacggaacccttccgatgtcctgcgcgcaggagtctggcatggaccgacaccccgctgcttgtgcctccgccaggatcaacgtctga

SEQ ID NO: 983 - DNA, 855 bp, Artificial Sequence
  Modified Open Reading Frame
atggtttcaaaaggtgaggagttattcacaggggtggtgccgattctggtggaactagatggtgatgttaacgggcataagttctccgtctccggtgagggcgagggtgatgccacgtacggcaagttgacgttaaagttcatttgcacgacgggcaaattacccgtgccctggcctacgttagtgacaacactgacgtatggcgtgcaatgtttctccaggtaccctgaccacatgaagcagcacgatttctttaagtcggcgatgccagagggttacgttcaagagcgtaccatcttctttaaagatgatggtaactataagacccgtgccgaggtcaagttcgaaggtgacactctggtaaatcgcatcgaacttaaaggaatcgacttcaaggaggatggcaacatcctcggtcataagctggagtataactacaacagccataatgtgtacattatggctgataagcagaaaaatggcattaaggtgaattttaagattcgccacaacattgaggacggaagcgtccagctggcagatcactaccagcagaacacgccaatcggagacggacccgtgcttttgcccgataaccactatctatccacccagtcggcactgtcgaaggacccgaacgaaaagcgggaccacatggtcctgcttgagttcgtgaccgcggccgggataaccctgggaatggacgagctgtataaacgcagccgggacatttcccacgggttcccgcccgcggtcgctgcgcaggatgacggtaccttaccaatgtcttgtgctcaagagagtggtatggaccgtcatcctgctgcatgcgcctctgctcgaataaacgtctga

SEQ ID NO: 984 - DNA, 855 bp, Artificial Sequence
  Modified Open Reading Frame
atggtaagcaaaggagaggagctgttcactggtgtcgtccccattctggtggagctggacggggacgtaaacggccacaagttctcggtgtctggagaaggagaaggcgacgccacctacggcaagcttacgctgaaatttatctgcaccacaggtaaacttcctgtgccgtggccgaccttggtgaccactctgacttatggcgtgcagtgcttcagtcggtaccctgaccacatgaagcagcatgacttctttaagtcggccatgcccgagggctacgtccaggagcggaccatcttctttaaagacgatggcaattacaagactcgggccgaggtgaagttcgagggagacaccttggtgaaccggatcgagctgaagggcatcgactttaaggaagatggcaacatcttgggccacaagttggagtacaactataactcccacaatgtgtatataatggccgacaagcagaagaatggcatcaaggtcaatttcaagattcggcacaacatcgaggacgggtctgttcaactcgctgaccactaccagcagaacacccccatcggtgacggcccagtattactgcccgacaaccattacttgtcgacacagtccgcgctttcgaaggatcccaacgaaaagcgcgatcacatggtcctactcgagttcgttacagctgcagggatcaccttgggcatggacgagttgtacaagagatctcgtgacatcagccacggctttcctccagctgtggccgcacaggacgatggcaccctgccaatgtcctgtgcccaggagagcgggatggacaggcatcctgccgcatgtgcgagcgcgaggatcaatgtgtaa

SEQ ID NO: 985 - DNA, 855 bp, Artificial Sequence
  Modified Open Reading Frame
atggttagcaaaggagaagaattatttacgggcgtggtgcctattttggtggagctggacggcgacgtgaacggacacaagttctcggtgtcgggcgagggcgagggcgacgccacctacgggaagcttaccctgaagttcatctgcactacgggtaagcttcccgtgccctggcccaccttagtgaccaccctcacctatggcgtgcagtgcttcagtcggtaccccgaccacatgaagcagcacgacttcttcaagtcggccatgcccgagggctatgtccaagagcgtaccatcttctttaaagacgatggcaattacaagacccgggccgaggtgaagttcgagggcgacaccttggtgaaccggatcgagctaaagggcatcgactttaaagaagatggtaacattcttggacataagctcgagtataattataactcgcacaatgtgtatatcatggccgacaagcagaagaacggaatcaaagtgaactttaagatccgtcacaacatcgaggacgggtccgttcagctcgccgaccactaccagcagaatacaccaataggagacggacccgtcttgctgcccgacaatcactacctatcgacacagtcagcactaagtaaggacccgaacgagaagcgggaccacatggtgctgctggagttcgtcactgccgcgggtatcaccctcggcatggacgagctgtacaaaagatcccgggacatcagccacggctttcctccagccgtggctgcgcaggacgacgggacgctgccgatgagctgcgcccaggagtccggcatggacaggcatcccgctgcctgtgccagtgccaggatcaatgtgtga

SEQ ID NO: 986 - DNA, 855 bp, Artificial Sequence
  Modified Open Reading Frame
atggttagcaaaggagaagagttgtttacgggcgtggtgcctattttggtggagctggacggcgacgtgaacggacacaagttctcggtgtcgggcgagggcgagggcgacgccacctacgggaagcttaccctgaagttcatctgcactacgggtaagcttcccgtgccctggcccaccttagtgaccaccctcacctatggcgtgcagtgcttcagtcggtaccccgaccacatgaagcagcacgacttcttcaagtcggccatgcccgagggctatgtccaagagcgtaccatcttctttaaagacgatggcaattacaagacccgggccgaggtgaagttcgagggcgacaccttggtgaaccggatcgagctaaagggcatcgactttaaagaagatggtaacattcttggacataagctcgagtataattataactcgcacaatgtgtatatcatggccgacaagcagaagaacggaatcaaagtgaactttaagatccgtcacaacatcgaggacgggtccgttcagctcgccgaccactaccagcagaatacaccaataggagacggacccgtcttactgccagacaaccactacctatcgacacagtcagcactaagtaaggacccgaacgagaagcgggaccacatggtgctgctggagttcgtcactgccgcgggtatcaccctcggcatggacgagctgtacaaaagatcccgggacatcagccacggctttcctccagccgtggctgcgcaggacgacgggacgctgccgatgagctgcgcccaggagtccggcatggacaggcatcccgctgcctgtgccagtgccaggatcaatgtgtaa

SEQ ID NO: 987 - DNA, 855 bp, Artificial Sequence
  Modified Open Reading Frame
atggtaagtaaaggagaggaactgttcaccggtgttgtgccgatactcgttgagcttgacggtgacgtgaatggacataagttcagcgtgagtggcgaaggcgaaggcgacgctacttacggcaagctgacgcttaagttcatatgcaccactggtaagttgccagtgccgtggccaactctcgtaaccaccttgacgtatggcgtgcagtgcttcagtcggtatcctgaccatatgaagcagcacgatttctttaagtctgccatgcctgaaggatacgtgcaagagcgtacgatattcttcaaggatgatggtaactataagacccgtgcggaggtgaagttcgagggtgatactctggtgaaccgaatcgagctcaagggtatcgatttcaaggaggatggtaacattctcggtcacaagttggagtataattacaacagccataatgtgtatatcatggccgacaagcagaaaaacggtatcaaggtcaactttaagatcaggcacaacatcgaggacggttccgttcagttggcagatcactaccaacagaacacacccatcggggatggaccagttctattacccgacaatcattatcttagtacccagtccgcgttgtccaaggatcctaatgagaagcgcgaccatatggtccttctggagttcgtgaccgctgctgggattactctcggtatggacgagctctataagagatctcgtgacatcagccacggctttcctccagctgtggccgcacaggacgatggcaccctgccaatgtcctgtgcccaggagagcgggatggacaggcaccctgccgcatgtgcgagcgctaggataaatgtataa

SEQ ID NO: 988 - DNA, 855 bp, Artificial Sequence
  Modified Open Reading Frame
atggtaagcaaaggagaggaactgttcaccggtgttgtgccgatactcgttgagcttgacggtgacgtgaatggacataagttcagcgtgagtggcgaaggcgaaggcgacgctacttacggcaagctgacgcttaagttcatatgcaccactggtaagttgccagtgccgtggccaactctcgtaaccaccttgacgtatggcgtgcagtgcttcagtcggtatcctgaccatatgaagcagcacgatttctttaagtctgccatgcctgaaggatacgtgcaagagcgtacgatattcttcaaggatgatggtaactataagacccgtgcggaggtgaagttcgagggtgatactctggtgaaccgaatcgagctcaagggtatcgatttcaaggaggatggtaacattctcggtcacaagttggagtataattacaacagccataatgtgtatatcatggccgacaagcagaaaaacggtatcaaggtcaactttaagatcaggcacaacatcgaggacggttccgttcagttggcagatcactaccaacagaacactcctatcggggatggaccagttctattgcctgataatcattatcttagtacccagtccgcgttgtccaaggatcctaatgagaagcgcgaccatatggtccttctggagttcgtgaccgctgctgggattactctcggtatggacgagctctataagagatctcgtgacatcagccacggctttcctccagctgtggccgcacaggacgatggcaccctgccaatgtcctgtgcccaggagagcgggatggacaggcaccctgccgcatgtgcgagcgctaggataaatgtataa

SEQ ID NO: 989 - DNA, 855 bp, Artificial Sequence
  Modified Open Reading Frame
atggttagcaaaggagaagaattatttacgggcgtggtgcctattttggtggagctggacggcgacgtgaacggacacaagttctcggtgtcgggcgagggcgagggcgacgccacctacgggaagcttaccctgaagttcatctgcactacgggtaagcttcccgtgccctggcccaccttagtgaccaccctcacctatggcgtgcagtgcttcagtcggtaccccgaccacatgaagcagcacgacttcttcaagtcggccatgcccgagggctatgtccaagagcgtaccatcttctttaaagacgatggcaattacaagacccgggccgaggtgaagttcgagggcgacaccttggtgaaccggatcgagctaaagggcatcgactttaaagaagatggtaacattcttggacataagctcgagtataattataactcgcacaatgtgtatatcatggccgacaagcagaagaacggaatcaaagtgaactttaagatccgtcacaacatcgaggacgggtccgttcagctcgccgaccactaccagcagaatacaccaataggagacggacccgtcttactgccagacaatcactacctatcgacacagtcagcactaagtaaggacccgaacgagaagcgggaccacatggtgctgctggagttcgtcactgccgcgggtatcaccctcggcatggacgagctgtacaaaagatcccgggacatcagccacggctttcctccagccgtggctgcgcaggacgacgggacgctgccgatgagctgcgcccaggagtccggcatggacaggcatcccgctgcctgtgccagtgccaggatcaatgtgtaa

SEQ ID NO: 990 - DNA, 855 bp, Artificial Sequence
  Modified Open Reading Frame
atggtgtccaagggcgaggagctgttcaccggcgtggtgcctatcctggtggagctggacggcgacgtgaacggccacaagtttagcgtgtccggcgagggcgaaggcgacgccacctacggcaagctgaccctgaagttcatctgcaccaccggcaaactgcccgtgccctggcccaccctcgtgaccaccctgacctacggagtccagtgcttcagcagataccccgaccacatgaagcagcacgacttcttcaagtccgccatgcccgagggctacgtgcaggaaagaaccatcttctttaaggacgacggaaactataagaccagggccgaggtgaagttcgagggagacaccctggtgaacagaatcgagctgaagggcatcgacttcaaagaggacggcaacatcctgggccacaagctggagtacaactacaacagccacaacgtgtacatcatggccgacaaacagaagaacgggatcaaggtgaactttaagatcagacacaacatcgaagacggcagcgtgcagctcgccgatcactaccagcagaacacaccgatcggcgacggccccgtgctgctgcccgacaaccattacctgagcactcagagcgccctgtccaaggaccctaacgagaagagagatcacatggtgctgctcgagttcgttaccgccgccggcatcaccctgggcatggacgagctgtacaagagatcccgcgacatcagccacggctttcctcccgccgtggccgcccaagacgacgggaccctgcccatgagctgcgcccaggagtccggcatggacagacaccccgccgcctgtgccagcgccaggatcaacgtgtaa

SEQ ID NO: 991 - DNA, 855 bp, Artificial Sequence
  Modified Open Reading Frame
atggtgtcaaaaggagaagagctgttcaccggcgtcgtgccgatcctggtggaattggacggcgacgtgaacggccacaaatttagcgtatccggcgagggcgaaggcgacgcgacctacggcaagctgaccttgaagttcatctgcacgaccggcaaactgcccgtgccgtggcccaccctcgtgaccacgctgacttacggagtccagtgcttcagcaggtaccccgaccacatgaagcagcacgacttctttaagtcagcgatgcccgaggggtacgtccaggagagaaccatcttctttaaggacgacgggaactataagacccgagcggaggtgaagttcgagggcgacaccctggtcaacagaatcgagctgaagggcatcgacttcaaagaggatggcaacatcctgggccacaagctggagtacaactacaacagccacaacgtgtacatcatggccgacaaacagaagaacggcatcaaggtgaactttaagatcaggcacaacatcgaagatggcagcgtgcagctcgccgaccactaccagcagaacacacctatcggcgacgggcccgttctgctgcccgataaccactatttgagcacgcagagcgccctttccaaggacccgaacgagaagagggatcacatggtcctcctcgagttcgtgaccgccgccggtatcacgctggggatggacgagctgtacaagaggtcccgagacatcagccacggctttcctccagccgtggctgcacaggacgacgggaccttgcccatgagctgcgcccaggagtccggcatggacagacaccccgccgcctgtgccagcgcccggatcaacgtgtaa

SEQ ID NO: 992 - DNA, 855 bp, Artificial Sequence
  Modified Open Reading Frame
atggtgtccaagggcgaggagctgttcaccggcgtggtgcctatcctggtggagctggacggcgacgtgaacggccacaagtttagcgtgtccggcgagggcgaaggcgacgccacctacggcaagctgaccctgaagttcatctgcaccaccggcaaactgcccgtgccctggcccaccctcgtgaccaccctgacctacggagtccagtgcttcagcagataccccgaccacatgaagcagcacgacttcttcaagtccgccatgcccgagggctacgtgcaggaaagaaccatcttctttaaggacgacggaaactataagaccagagccgaggtgaagttcgagggagacaccctggtgaacagaatcgagctgaagggcatcgacttcaaagaggacggcaacatcctgggccacaagctggagtacaactacaacagccacaacgtgtacatcatggccgacaaacagaagaacgggatcaaggtgaactttaagatcagacacaacatcgaagacggcagcgtgcagctcgccgaccactaccagcagaacacacccatcggcgacggacccgtgctgctgcccgacaaccattacctgagcacccagagcgccctgtccaaggaccctaacgagaagagagatcacatggtgctgctcgagttcgtgaccgccgccggcatcaccctgggcatggacgagctgtacaagagatcccgcgacatcagccacggctttcctcccgccgtggccgcccaagacgacgggaccctgcccatgagctgcgcccaggagtccggcatggacagacaccccgccgcctgtgccagcgccaggatcaacgtgtaa

SEQ ID NO: 993 - DNA, 855 bp, Artificial Sequence
  Modified Open Reading Frame
atggtgtccaagggcgaggagctgttcaccggcgtggtgccaatactggtggagctggacggcgatgtgaacggtcacaagttcagcgtgtccggcgagggcgaaggtgacgcaacctacggcaagctgacactgaagttcatatgcacaaccggcaaactaccggtgccttggcccacgctggtgaccacccttacctacggagtccagtgcttcagtcggtaccccgaccatatgaagcagcacgacttcttcaagtccgccatgcccgagggttacgtgcaggagaggaccatcttctttaaggacgacggtaactataagaccagagccgaggtgaagttcgagggtgacaccctcgtgaacagaatcgagctgaagggcatcgacttcaaggaggatggcaacatcctcggccataagctggagtacaactacaacagccacaatgtgtatataatggccgacaaacagaagaacggtatcaaggtgaactttaaaatcaggcacaatatcgaggacggcagcgttcagctggcagaccactaccagcaaaacactccgatcggcgacggtccagtgctgctgcccgataaccattacctgagcacacagagcgcgctttcgaaggaccctaacgagaagagagatcacatggtgctgcttgagtttgttaccgccgccggcatcaccctgggcatggacgagctttacaagagatcccgcgacataagccacggcttcccgccagccgtggctgcccaggacgacgggaccctgcccatgagctgcgcccaggagtccggcatggacaggcatcccgccgcctgtgctagcgccaggatcaacgtgtaa

SEQ ID NO: 994 - DNA, 855 bp, Artificial Sequence
  Modified Open Reading Frame
atggtgtcgaagggcgaggagctgttcaccggcgtggttccaatcctggtggagctggacggcgacgtgaacggccacaagtttagcgtgtccggagagggcgagggtgatgccacctacggcaagctgaccttgaagttcatctgcactaccggcaaactgcccgtgccctggccgacgttggtgaccacccttacctacggcgtccagtgcttcagcagataccccgatcacatgaagcagcacgacttcttcaagtcggccatgcccgagggctatgtgcaagaaaggacgatcttttttaaggacgacggcaactataagactagagccgaggtcaagttcgagggtgacaccctcgtgaaccgaatcgagctgaagggcatcgatttcaaagaggatggcaacatcctgggtcacaagctggagtacaactacaacagccacaacgtgtacataatggccgacaagcagaagaacggtatcaaggtgaactttaagatcagacacaatatcgaagacggcagcgtgcagcttgccgatcactaccagcagaacacgccgatcggcgacggtcccgtgctgctgcccgataatcattacctgagcacccagagcgccctctccaaggacccgaacgagaagagggatcacatggttcttcttgagttcgtgaccgccgccggcatcaccctgggaatggacgagctgtataagcgatcccgcgatatcagccacggctttcctccagccgtggccgcgcaggacgacgggaccctgcccatgagctgcgcacaggagtccggcatggatagacatccagccgcctgtgccagcgcaaggataaatgtctaa

SEQ ID NO: 995 - DNA, 855 bp, Artificial Sequence
  Modified Open Reading Frame
atggtatcaaagggtgaagagctcttcaccggcgtcgtccccatcctcgtcgagttagacggagatgtgaatggtcacaagttctccgtctccggcgagggtgagggcgacgccacctacggcaagttaactcttaagtttatttgcacgacaggtaaacttccggttccctggccgacactggtcaccacacttacgtatggtgtccagtgcttcagtcggtatcccgaccatatgaagcagcacgacttcttcaagtcggccatgcccgagggttatgtccaggagcggaccatctttttcaaagatgacgggaactataagacacgggccgaggttaagttcgagggcgacactctggtgaatcgcatcgaacttaagggtatcgactttaaggaggacgggaacatactggggcacaagctggagtacaactataactcgcataatgtctatatcatggctgataagcagaagaatggcatcaaggtcaacttcaagattagacataatatcgaggatggtagtgtccagctggccgaccattaccagcagaatactccgattggtgatggtccagtattgcttcccgataatcactacctgtcgacccagtcggccctgtctaaggacccgaatgaaaagcgggaccatatggtcctgcttgagttcgttaccgctgctggcataaccctgggcatggacgagttgtacaagaggtcgcgcgacatcagccatggcttccccccggctgttgctgcgcaggacgatgggactcttcccatgtcctgcgcgcaggagtcggggatggatcgccatccggctgcgtgtgcgtcggccaggattaatgtttaa

SEQ ID NO: 996 - DNA, 855 bp, Artificial Sequence
  Modified Open Reading Frame
atggtgtcaaaaggagaggagctgttcaccggcgtcgtgccgatcctggtggaattggacggcgacgtgaacggccacaaatttagcgtgtccggcgagggcgaaggcgacgcgacctacggcaagctgaccttgaagttcatctgcacgaccggcaaactgcccgtgccgtggcccaccctcgtgaccacgctgacttacggagtccagtgcttcagcaggtaccccgaccacatgaagcagcacgacttctttaagtcagcgatgcccgaggggtacgtccaggagagaaccatcttctttaaggacgacgggaactataagacccgagcggaggtgaagttcgagggcgacaccctggtcaacagaatcgagctgaagggcatcgacttcaaagaggatggcaacatcctgggccacaagctggagtacaactacaacagccacaacgtgtacatcatggccgacaaacagaagaacggcatcaaggtgaactttaagatcaggcacaacatcgaagatggcagcgtgcagctcgccgaccactaccagcagaacacacctatcggcgacgggcccgttctgctgcccgataaccactatttgagcacgcagagcgccctttccaaggacccgaacgagaagagggatcacatggtcctcctcgagttcgtgaccgccgccggtatcacgctggggatggacgagctgtacaagaggtcccgagacatcagccacggctttcctccagccgtggctgcacaggacgacgggaccttgcccatgagctgcgcccaggagtccggcatggacagacaccccgccgcctgtgccagcgcccggatcaacgtttaa

SEQ ID NO: 997 - DNA, 855 bp, Artificial Sequence
  Modified Open Reading Frame
atggtgagtaaaggagaggagctgttcactggtgtcgtgcctattctggtggagctggacggcgatgtgaacggacataagttctcggtgtctggagagggagagggtgacgcaacgtacgggaagcttactctgaaatttatctgtaccacgggtaagcttcctgtgccgtggccgaccttggtgaccactctgacttatggcgtgcagtgcttcagtcggtatcccgaccacatgaagcagcacgacttcttcaagtcggccatgcctgaaggatatgtccaggagaggaccatattcttcaaggatgacggcaattataagacgcgtgcggaagtcaagtttgaaggcgatactcttgtcaatcggattgaactgaagggtatcgacttcaaagaggacggtaatatactcgggcataagctcgagtataattacaattcccacaacgtctatataatggctgacaagcagaagaatggcatcaaggtcaacttcaagatccggcataacatcgaggacgggtctgttcagctcgctgaccactaccagcagaatacacccatcggtgacggcccagtattgttgcccgacaaccattacttgtcgacgcagagtgccctgtcaaaggatcctaatgagaagcgtgatcatatggtccttctagagttcgtcactgccgcagggattactctcggtatggacgagctctacaagagatctcgcgacatcagccacggctttcctcccgctgtggccgcacaggacgatggcaccctgccaatgtcctgtgcccaggagagcgggatggacagacacccagccgcatgtgcgagcgcgaggataaatgtataa

SEQ ID NO: 998 - DNA, 855 bp, Artificial Sequence
  Modified Open Reading Frame
atggtaagtaaaggagaggagctgttcactggtgtcgtccctattctggtggagctggacggcgatgtgaacggacataagttctcggtgtctggagagggagagggtgacgcaacgtacgggaagcttactctgaaatttatctgtaccacgggtaagcttcctgtgccgtggccgaccttggtgaccactctgacttatggcgtccagtgtttcagtaggtatcccgaccacatgaagcagcacgacttcttcaagtcggctatgcctgaaggatatgtccaggaaaggaccatattcttcaaggacgacggcaattataagacgcgtgcggaagtcaagtttgaaggcgatactcttgtcaatagaattgaactgaagggtatcgacttcaaagaggacggtaatatactcgggcacaagctcgagtataattacaattcccacaacgtctatataatggctgataagcagaagaatggcatcaaggtcaacttcaagatccggcataacatcgaggacgggtctgttcagctcgctgaccactaccagcagaatacacccatcggtgacggaccagtgttactgcccgacaaccactatttgtcgacgcagagtgcattgtccaaggacccgaatgagaagcgagaccacatggtcctgctcgaattcgtcacggctgcagggattactttaggcatggatgagctctacaagagatctcgtgacatcagccacggctttccaccagctgtcgccgcacaggacgatggcaccctgccaatgtcatgtgcgcaggagagcgggatggacaggcaccctgcagcctgtgcgagcgcgcggataaatgtgtaa

SEQ ID NO: 999 - DNA, 855 bp, Artificial Sequence
  Modified Open Reading Frame
atggtgagtaaaggtgaggagctgttcaccggcgtggtgcctatcctggtggagctggacggcgacgtgaacggccacaagttcagcgtgtccggcgagggcgagggcgacgccacctatggcaagctgaccctgaagttcatctgcaccaccggcaaactgcccgtgccctggcccaccctggtgaccaccctcacctatggagtgcagtgcttctcgaggtaccccgaccacatgaagcagcacgacttctttaagtccgccatgcccgaggggtacgtccaggaaagaaccatcttcttcaaggacgacggcaattataagaccagagccgaggtgaagttcgagggtgacaccctcgtgaaccgaatcgagctgaagggcatagacttcaaggaggatggcaacatcctcggccacaaactggagtacaattataacagccataatgtgtacatcatggccgataaacagaagaatgggatcaaggtgaactttaagatcagacataatatcgaagacggcagcgtgcagctcgccgatcactaccagcagaacacaccgatcggcgacggacccgtgctgctgcccgataaccattatctgagcacccagtccgccctgtccaaggaccctaatgagaagagagatcacatggtgctgctcgagttcgtgaccgccgccggcatcaccctgggcatggacgagctttataagagatcccgcgacatcagccacggctttcctccagccgtggccgcgcaggacgacgggaccctgcccatgagctgcgctcaggagtccggcatggacaggcatcccgccgcctgcgcgagcgcgaggatcaacgtgtaa

SEQ ID NO: 1000 - DNA, 855 bp, Artificial Sequence
  Modified Open Reading Frame
atggttagcaagggcgaggagttgtttacgggcgtggtgcctattctggtggagctggacggcgacgtgaacggacacaagttctcggtgtcgggcgagggcgagggcgacgccacctacgggaagcttaccctgaagttcatctgcactacgggtaagcttcccgtgccctggcccaccttagtgaccaccctcacctatggcgtgcagtgcttcagtcggtaccccgaccacatgaagcagcacgacttcttcaagtcggccatgcccgagggctatgtccaagagcgtaccatcttctttaaagacgatggcaattacaagacccgggccgaggtgaagttcgagggcgacaccttggtgaaccggatcgagctaaagggcatcgactttaaagaagatggtaacattcttggacataagctcgagtataattataactcgcacaatgtgtatatcatggccgacaagcagaagaacggaatcaaagtgaactttaagatccgtcacaacatcgaggacgggtccgttcagctcgccgaccactaccagcagaatacaccaataggagacggacccgtcttactgccagacaaccactatttgtccacccagtcagcactaagtaaggacccgaacgagaagcgggaccacatggtgctgctggagttcgtcactgccgcgggtatcaccctcggcatggacgagctgtacaaaagatcccgggacatcagccacggctttcctccagccgtggctgcgcaggacgacgggacgctgccgatgagctgcgcccaggagtccggcatggacaggcatcccgctgcctgtgccagtgccaggatcaatgtgtaa

SEQ ID NO: 1001 - DNA, 855 bp, Artificial Sequence
  Modified Open Reading Frame
atggttagcaagggcgaggagttatttacgggcgtggtgcctattttggtggagctggacggcgacgtgaacggacacaagttctcggtgtcgggcgagggcgagggcgacgccacctacgggaagcttaccctgaagttcatctgcactacgggtaagcttcccgtgccctggcccaccttagtgaccaccctcacctatggcgtgcagtgcttcagtcggtaccccgaccacatgaagcagcacgacttcttcaagtcggccatgcccgagggctatgtccaagagcgtaccatcttctttaaagacgatggcaattacaagacccgggccgaggtgaagttcgagggcgacaccttggtgaaccggatcgagctaaagggcatcgactttaaagaagatggtaacattcttggacataagctcgagtataattataactcgcacaatgtgtatatcatggccgacaagcagaagaacggaatcaaagtgaactttaagatccgtcacaacatcgaggacgggtccgttcagctcgccgaccactaccagcagaatacaccaataggagacggacccgtcttactgccagacaatcactatttgtccacccagtcagcactaagtaaggacccgaacgagaagcgggaccacatggtgctgctggagttcgtcactgccgcgggtatcaccctcggcatggacgagctgtacaaaagatcccgggacatcagccacggctttcctccagccgtggctgcgcaggacgacgggacgctgccgatgagctgcgcccaggagtccggcatggacaggcatcccgctgcctgtgccagtgccaggatcaatgtgtaa

SEQ ID NO: 1002 - DNA, 855 bp, Artificial Sequence
  Modified Open Reading Frame
atggttagcaaaggagaagaattatttacgggcgtggtgcctattttggtggagctggacggcgacgtgaacggacacaagttctcggtgtcgggcgagggcgagggcgacgccacctacgggaagcttaccctgaagttcatctgcactacgggtaagcttcccgtgccctggcccaccttagtgaccaccctcacctatggcgtgcagtgcttcagtcggtaccccgaccacatgaagcagcacgacttcttcaagtcggccatgcccgagggctatgtccaagagcgtaccatcttctttaaagacgatggcaattacaagacccgggccgaggtgaagttcgagggcgacaccttggtgaaccggatcgagctaaagggcatcgactttaaagaagatggtaacattcttggacataagctcgagtataattataactcgcacaatgtgtatatcatggccgacaagcagaagaacggaatcaaagtgaactttaagatccgtcacaacatcgaggacgggtccgttcagctcgccgaccactaccagcagaatacaccaataggagacggacccgtcttactgccagacaatcactatttatcaacccagtcagcactaagtaaggacccgaacgagaagcgggaccacatggtgctgctggagttcgtcactgccgcgggtatcaccctcggcatggacgagctgtacaaaagatcccgggacatcagccacggctttcctccagccgtggctgcgcaggacgacgggacgctgccgatgagctgcgcccaggagtccggcatggacaggcatcccgctgcctgtgccagtgccaggatcaatgtgtaa

SEQ ID NO: 1003 - DNA, 855 bp, Artificial Sequence
  Modified Open Reading Frame
atggtttctaagggcgaggagttgtttacgggtgtcgttcccatcctcgtcgagctagacggagacgttaacggtcataagttttctgtttccggtgagggtgagggcgacgccacgtacggcaagctcacattgaagttcatatgtaccacgggcaagctgcccgtgccgtggcccaccctcgtaactaccctcacgtacggtgtccagtgtttctcgcgctacccggaccatatgaagcagcacgacttcttcaagtccgcgatgcccgagggctacgtccaggagcgcacaatcttcttcaaagacgatggaaactacaagactcgtgcggaggtgaagtttgagggcgacacccttgtgaaccgaatcgagctgaaaggcatcgatttcaaggaggatggtaacatcctgggccacaagctggagtacaactacaactcccacaacgtgtatattatggcggataagcagaagaatggcattaaggtcaacttcaagatccgccataatatagaggacgggtccgttcagctggcggatcactaccagcagaacacacccatcggtgacggacccgtcctcctgccggacaatcactacttgtccacgcagtccgcgctctcaaaggaccccaatgagaagcgcgatcacatggtcctgctggagttcgtcacagccgcagggataactctgggcatggacgaactctacaagcgctcgcgcgacatctcccacgggtttccacccgcagtcgcggcgcaggacgatgggacactccccatgtcctgcgcgcaggagtccggcatggatagacatcctgccgcttgcgcgagcgccaggatcaacgtgtga

SEQ ID NO: 1004 - DNA, 855 bp, Artificial Sequence
  Modified Open Reading Frame
atggtatctaagggcgaggagctgtttacgggcgtcgtccccatcctcgtcgagctagacggagacgtgaacggtcacaagttctccgtctccggtgagggtgagggcgacgccacgtacggcaagctcacattgaagttcatatgtacaacgggcaagctgcccgtgccatggcccaccctcgtaactaccctcacgtacggtgtccagtgtttctcgcgctacccggaccatatgaagcagcacgacttcttcaagtccgcgatgcccgagggctacgtccaggagcgcacaatcttcttcaaagacgatggaaactacaagactcgtgcggaggtgaagttcgagggcgacacccttgtcaaccgaatcgagctgaaaggcatcgacttcaaggaggatggcaacatcctgggccataagctggagtacaactacaactcccacaacgtctatattatggcggataagcagaagaatggcattaaggtcaacttcaagatccgccataatatagaggacgggtccgttcagctggcggatcactaccagcagaacacacccatcggtgacggacccgtcctcctgccggacaatcactacttgtccacacagtccgcgctctcaaaggaccccaatgagaagcgcgatcacatggtcctgctggagttcgtcactgccgcggggataaccctcggcatggacgaactctacaagcgctcgcgcgacatctcccacgggtttccacccgcagtcgcggcgcaggacgatgggacactccccatgtcctgcgcgcaggagtccggcatggatagacatcctgccgcttgcgcgagcgccaggatcaacgtgtga

SEQ ID NO: 1005 - DNA, 855 bp, Artificial Sequence
  Modified Open Reading Frame
atggtttctaagggcgaggagctgtttacgggcgtcgttcccatcctcgtcgagctagacggagacgttaacggtcataagttctccgtttccggtgagggtgagggcgacgccacgtacggcaagctcacattgaagttcatatgtaccacgggcaagctgcccgtgccgtggcccaccctcgtaactaccctcacgtacggtgtccagtgtttctcgcgctacccggaccatatgaagcagcacgacttcttcaagtccgcgatgcccgagggctacgtccaggagcgcacaatcttcttcaaagacgatggaaactacaagactcgtgcggaggtgaagttcgagggcgacacccttgtgaaccgaatcgagctgaaaggcatcgatttcaaggaggatggtaacatcctgggccacaagctggagtacaactacaactcccacaacgtgtatattatggcggataagcagaagaatggcattaaggtcaacttcaagatccgccataatatagaggacgggtccgttcagctggcggatcactaccagcagaacacacccatcggtgacggacccgtcctcctgccggacaatcactacttgtccacgcagtccgcgctctcaaaggaccccaatgagaagcgcgatcacatggtcctgctggagttcgtcacagccgcagggataactctgggcatggacgaactctacaagcgctcgcgcgacatctcccacgggtttccacccgcagtcgcggcgcaggacgatgggacactccccatgtcctgcgcgcaggagtccggcatggatagacatcctgccgcttgcgcgagcgccaggatcaacgtgtga

SEQ ID NO: 1006 - DNA, 855 bp, Artificial Sequence
  Modified Open Reading Frame
atggtatctaaaggcgaggaactgttcacgggcgtggtgcccatcctcgtcgaactcgacggggatgtgaatggtcacaagtttagtgtgtcaggggagggggagggtgatgcaacttatgggaaacttacccttaagtttatatgcaccaccggaaaactccccgtcccctggcccacgcttgtgaccacactcacttacggcgtgcagtgttttagccgttatcctgaccacatgaaacagcacgatttcttcaaaagcgcaatgccggagggctatgtgcaggagagaacgatctttttcaaggatgacggcaattacaagacgcgcgccgaagtgaagttcgagggcgacacgctcgtgaacaggatcgaactcaaggggatagatttcaaagaggacgggaacatcctcgggcacaagctggagtataattacaacagccacaacgtctatattatggcggataagcagaagaacggtataaaggttaattttaagatccgccataatatagaggatgggagtgttcagttggcagaccactaccaacagaacactcccatcggggatgggcccgtcctcttgccggacaatcattatttgtccacgcaaagtgctctctctaaggacccgaacgaaaagagagaccacatggtccttttagagttcgtcactgccgcagggataaccctgggcatggacgaactctataagagatcgagagatatctcccatgggttccctccggcggtagcggcacaagacgatgggacccttcccatgtcttgtgcgcaggagtcgggcatggaccgacatcctgcagcatgcgctagcgctcggataaatgtttaa

SEQ ID NO: 1007 - DNA, 855 bp, Artificial Sequence
  Modified Open Reading Frame
atggtgtcgaagggggaggagctgttcaccggtgtggtgcctatcctggtagagctggacggcgacgtgaacggacataagttctcggtgtcgggcgagggcgagggcgacgccacctacgggaagcttaccctgaagttcatctgcactacgggtaagcttcccgtgccctggcccaccttagtgaccaccctcacctatggcgtgcagtgcttcagtcggtaccccgaccacatgaagcagcacgacttcttcaagtcggccatgcccgagggctatgtccaagagcgtaccatcttctttaaagacgatggcaattacaagacccgggccgaggtgaagttcgagggcgacaccttggtgaaccggatcgagctaaagggcatcgactttaaagaagatggtaacattcttggacataagctcgagtacaactacaactcgcacaatgtgtacatcatggccgacaagcagaagaacggaatcaaagtgaactttaagatccgtcacaacatcgaggacgggtccgttcagctcgccgaccactaccagcagaacacccccatcggtgacggccccgtcctccttcccgacaaccattatcttagtacccagtcagcactaagtaaggacccgaacgagaagcgggaccacatggtgctgctggagttcgtcactgccgcgggtatcaccctcggcatggacgagctgtacaagagatcccgcgacatcagccacggctttcctccagccgtggctgctcaggacgacgggacgctgcccatgagctgcgctcaggagtccggcatggacaggcatcccgctgcctgtgccagtgccaggatcaacgtgtaa

SEQ ID NO: 1008 - DNA, 855 bp, Artificial Sequence
  Modified Open Reading Frame
atggtgtctaaaggggaagagttgttcacaggggtggtgcctatcttagttgagctagacggggacgtcaatggacataaattctccgtttccggagaaggggaaggtgatgctacgtacggaaaattgacacttaagtttatctgcaccacgggaaagcttcccgtgccatggccgacactggtgactaccctgacttacggggtgcagtgcttcagccgttacccagatcacatgaagcaacatgatttttttaagagtgcaatgcccgagggttacgtacaagaaaggaccatcttttttaaagacgacggtaattacaagactcgcgccgaagttaaattcgagggggatactttagttaaccgtattgaacttaagggtattgactttaaagaggatggaaatattctgggtcataagctggagtacaactacaatagtcataatgtctatatcatggccgataagcagaagaatggtattaaggtcaattttaagatacgtcataatattgaggatggcagcgtccaacttgccgaccattatcagcagaacacgccaataggggacggcccggtactccttcccgataatcattatctgtccactcagtctgccttgtccaaggatcccaatgaaaaacgtgatcatatggttttactcgagttcgtaactgcggcgggaatcactctaggcatggatgagctgtataaacgttcaagggatatatcgcatggctttccaccagcagttgcagcgcaggacgatggcactttgccaatgtcctgtgctcaggagtcgggtatggataggcaccccgccgcatgtgcttcggctcggattaatgtataa

SEQ ID NO: 1009 - DNA, 855 bp, Artificial Sequence
  Modified Open Reading Frame
atggtgtctaaaggggaagagttgtttacaggggtagtgcctatcttagttgagctagacggggacgtcaatggacataaattctccgtttccggagaaggggaaggtgatgctacgtacggaaaattaacacttaagtttatctgcacaacgggaaagcttcccgtgccatggccgacactggtgactaccctcacttatggggtccagtgcttcagccgttacccagatcacatgaagcaacatgatttttttaagagtgcaatgcccgagggttacgtacaagaaaggaccatcttttttaaagacgacggtaattacaagactcgcgccgaagttaaattcgagggggatactttagttaaccgtattgaacttaagggtattgactttaaagaggatggaaatattctgggtcataaactcgaatacaactacaatagtcataatgtctacataatggccgataaacagaaaaatggtattaaggtcaattttaagataagacacaacatcgaggatggcagcgtccaacttgccgaccattatcagcagaacacgccaataggggacggcccggtactccttcccgacaaccattatctgtccactcagtctgccttgtccaaggatcccaatgaaaaacgtgatcatatggttttactcgagttcgtaactgcggcgggaatcactctaggcatggatgagctgtataaacgttcaagggatatatcgcatggctttccaccagcagttgcagcgcaagacgacggcactttgccaatgtcatgtgctcaggagtcgggtatggataggcacccggccgcatgtgcttcggctcggattaatgtataa

SEQ ID NO: 1010 - DNA, 855 bp, Artificial Sequence
  Modified Open Reading Frame
atggttagtaaaggagaggagctgttcacgggggtggtacccattctggtagagctcgatggagatgtcaatggtcataagttctcggtatcgggagaaggtgagggggatgctacgtatggcaagctgaccctgaagtttatctgtaccacaggtaaacttccggtcccctggcctacgctagtaaccaccctcacctatggtgtccagtgtttctcccgatacccagatcatatgaagcaacatgacttcttcaagagcgcaatgccagaagggtacgtccaagaaaggaccatcttttttaaagatgacggcaactataaaactcgcgcagaggtcaaatttgaaggcgatacccttgtgaatcgcatcgagctcaagggtatcgacttcaaagaggacgggaatatactcgggcacaagctcgagtataattataattcccacaacgtctatattatggcggataagcagaaaaatggcattaaagtcaatttcaagatccgccataatatagaggacgggagcgtgcagctggcggatcactaccagcagaacacgccgataggtgatggtccggtattattaccggataaccattacctgtcaacgcagagcgcgctctcgaaggacccgaacgagaagcgcgatcatatggtgcttctcgagttcgtgactgcggcgggaatcacgttggggatggacgagctgtataagcgcagccgggacatctcccacggattcccgcccgcagtcgcggcgcaggatgacggtaccttgccaatgtcttgtgctcaagagagtggcatggaccgtcatcctgcggcctgcgcgagcgcacggattaacgtgtga

SEQ ID NO: 1011 - DNA, 855 bp, Artificial Sequence
  Modified Open Reading Frame
atggtttctaaaggcgaggagttgttcaccggtgtggtgcccatactggtggagctggacggcgacgtcaacggccacaagttctctgtgtccggcgagggcgagggcgatgccacctatggcaagcttaccctgaagttcatctgcaccacgggtaagctgcccgtgccctggcccaccttggtgaccaccctgacctatggcgtgcagtgcttcagtcggtaccccgaccacatgaagcagcacgacttcttcaagtcggccatgccggagggctacgtccaggagcggaccatcttctttaaggacgatggcaattacaagacccgggccgaggtgaagttcgagggcgacaccttggtgaaccggatcgagctgaagggcatcgactttaaggaggatggcaacatcctgggccacaagttggagtataattataactctcacaatgtgtatatcatggccgacaagcagaagaatggcatcaaggtgaacttcaagatccggcacaacatcgaggacggctctgtgcagctggccgatcactatcagcagaacacgcccattggtgacggccccgtgctcttgccggacaaccattatttgtccacccagagtgcgttgtccaaggacccgaacgagaagcgggaccacatggtcctgcttgagttcgtgaccgccgcgggtatcaccctcggcatggacgagctgtacaagagatcccgcgacatcagccacggctttcctccagccgtggctgcccaagacgacgggaccctgcccatgagctgcgcccaggagtccggcatggacagacatccagccgcctgtgccagcgccaggatcaacgtgtaa

SEQ ID NO: 1012 - DNA, 855 bp, Artificial Sequence
  Modified Open Reading Frame
atggtttctaaaggcgaggagttgttcaccggtgtggtgcccatactggtggagctggacggcgacgtcaacggccacaagttctctgtgtctggcgagggcgagggcgatgccacctatggcaagcttaccctgaagttcatctgcaccacgggtaagctgcccgtgccctggcccaccttggtgaccaccctgacctatggcgtgcagtgcttcagtcggtaccccgaccacatgaagcagcacgacttcttcaagtcggccatgccggagggctacgtccaggagcggaccatcttctttaaggacgatggcaattacaagacccgggccgaggtgaagttcgagggcgacaccttggtgaaccggatcgagctgaagggcatcgactttaaggaggatggcaacatcctgggccacaagttggagtacaactacaactctcacaatgtgtatatcatggccgacaagcagaagaatggcatcaaggtgaacttcaagatccggcacaacatcgaggacggctctgtgcagctggccgatcactatcagcagaacacgcccattggtgacggccccgtgctcttgccggacaaccattatttgtccacccagagtgcgttgtccaaggacccgaacgagaagcgggaccacatggtcctgcttgagttcgtgaccgccgcgggtatcaccctcggcatggacgagctgtacaagagatcccgcgacatcagccacggctttcctcccgccgtggccgcccaagacgacgggaccctgcccatgagctgcgcccaggagtccggcatggacagacaccccgccgcctgtgccagcgccaggatcaacgtgtaa

SEQ ID NO: 1013 - DNA, 855 bp, Artificial Sequence
  Modified Open Reading Frame
atggtttctaagggcgaggagttgttcaccggtgtggtgcccatactggtggagctggacggcgacgtcaacggccacaagttctctgtgtctggcgagggcgagggcgatgccacctatggcaagcttaccctgaagttcatctgcaccacgggtaagctgcccgtgccctggcccaccttggtgaccaccctgacctatggcgtgcagtgcttcagtcggtaccccgaccacatgaagcagcacgacttcttcaagtcggccatgccggagggctacgtccaggagcggaccatcttctttaaggacgatggcaattacaagacccgggccgaggtgaagttcgagggcgacaccttggtgaaccggatcgagctgaagggcatcgactttaaggaggatggcaacatcctgggccacaagttggagtacaactacaactctcacaatgtgtatatcatggccgacaagcagaagaatggcatcaaggtgaacttcaagatccggcacaacatcgaggacggctctgtgcagctggccgatcactatcagcagaacacgcccattggtgacggccccgtgctcttgccggacaaccattatttgtccacccagagtgcgttgtccaaggacccgaacgagaagcgggaccacatggtcctgcttgagttcgtgaccgccgcgggtatcaccctcggcatggacgagctgtacaagagatcccgcgacatcagccacggctttcctcccgccgtggccgcccaagacgacgggaccctgcccatgagctgcgcccaggagtccggcatggacagacaccccgccgcctgtgccagcgccaggatcaacgtgtaa

SEQ ID NO: 1014 - DNA, 855 bp, Artificial Sequence
  Modified Open Reading Frame
atggtcagtaagggagaagagctcttcacgggagtagtgcccatcctggtcgaactggacggagacgtcaacggacacaagtttagtgtctcgggcgagggtgagggggacgccacgtacgggaagcttaccctgaagtttatctgtactacagggaagcttcccgtaccgtggccgaccctcgtcaccacgcttacgtacggcgtccaatgcttcagtcggtaccccgaccatatgaagcagcatgacttttttaagtcagcaatgcctgaaggatatgtccaagagcgtaccatcttctttaaagacgatggcaactacaagacgagggccgaggtaaaattcgaaggagataccttggtcaatcggattgagttgaagggcatcgactttaaagaagatggtaacattcttggacataaattggagtacaattataacagccataatgtatacattatggcggacaagcagaagaatgggataaaggttaactttaagatacgtcacaatattgaggacggttcggtgcagttagcggaccattaccaacagaacactcctattggtgatggtccggtactgctaccggacaaccattatctctctacgcagtccgccctgtcgaaggacccgaacgaaaagcgggaccacatggtcctgcttgagttcgtcactgcggcagggatcactttaggcatggacgagctgtacaagcgaagccgtgacatcagtcacggcttcccgcccgcagttgcggcccaggatgatggcactctcccgatgagctgcgcgcaggagagcgggatggaccgccatcccgctgcctgcgcgtctgcacggattaacgtgtag

SEQ ID NO: 1015 - DNA, 855 bp, Artificial Sequence
  Modified Open Reading Frame
atggtttctaagggcgaggagctgtttacgggcgtcgttcccatcctcgtcgagctagacggagacgttaacggtcataagttctccgtttccggtgagggtgagggcgacgccacgtacggcaagctcacattgaagttcatatgtaccacgggtaagctacctgtgccgtggcccaccctcgtaactaccctcacgtacggtgtccagtgtttctcgcgctacccggaccatatgaagcagcacgacttcttcaagtccgcgatgcccgagggctacgtccaggagcgcacaatcttcttcaaagacgatggaaactacaagactcgtgcggaggtgaagttcgagggcgacacccttgtgaaccgaatcgagctgaaaggcatcgatttcaaggaggatggtaacatcctgggtcacaagctggagtacaactacaactcccacaacgtctatattatggcggataagcagaagaatggcattaaggttaacttcaagatccgccataatatagaggacgggtccgttcagctggcggatcactaccagcagaacacacccatcggtgacggacccgtactgctgccggacaatcactacttgtccacgcagtccgcgctctcaaaggaccccaatgagaagcgcgatcacatggtcctgctagagttcgtcacagccgcagggataactctgggcatggacgaactctacaagcgctcgcgcgacatctcccacgggtttccacccgccgttgcggcgcaggacgatgggacactccccatgtcctgcgcgcaggagtccggcatggatagacatcctgccgcttgcgcgagcgccaggatcaacgtatga

SEQ ID NO: 1016 - DNA, 855 bp, Artificial Sequence
  Modified Open Reading Frame
atggtttctaagggcgaggagctgtttacgggcgtcgttcccatcctcgtcgagctagacggagacgttaacggtcataagttctccgtttccggtgagggtgagggcgacgccacgtacggcaagctcacattgaagttcatatgtaccacgggcaagctgcccgtgccgtggcccaccctcgtaactaccctcacgtacggtgtccagtgtttctcgcgctacccggaccatatgaagcagcacgacttcttcaagtccgcgatgcccgagggctacgtccaggagcgcacaatcttcttcaaagacgatggaaactacaagactcgtgcggaggtgaagttcgagggcgacacccttgtgaaccgaatcgagctgaaaggcatcgatttcaaggaggatggtaacatcctgggccacaagctggagtacaactacaactcccacaacgtctatattatggcggataagcagaagaatggcattaaggttaacttcaagatccgccataatatagaggacgggtccgttcagctggcggatcactaccagcagaacacacccatcggtgacggacccgtactgctgccggacaatcactacttgtccacgcagtccgcgctctcaaaggaccccaatgagaagcgcgatcacatggtcctgctggagttcgtcacagccgcagggataactctgggcatggacgaactctacaagcgctcgcgcgacatctcccacgggtttccacccgcagtcgcggcgcaggacgatgggacactccccatgtcctgcgcgcaggagtccggcatggatagacatcctgccgcttgcgcgagcgccaggatcaacgtgtga

SEQ ID NO: 1017 - DNA, 855 bp, Artificial Sequence
  Modified Open Reading Frame
atggtttctaagggcgaggagctgtttacgggcgtcgttcccatcctcgtcgagctagacggagacgttaacggtcataagttctccgtttccggtgagggtgagggcgacgccacgtacggcaagctcacattgaagttcatatgtaccacgggcaagctgcccgtgccgtggcccaccctcgtaactaccctcacgtacggtgtccagtgtttctcgcgctacccggaccatatgaagcagcacgacttcttcaagtccgcgatgcccgagggctacgtccaggagcgcacaatcttcttcaaagacgatggaaactacaagactcgtgcggaggtgaagttcgagggcgacacccttgtgaaccgaatcgagctgaaaggcatcgatttcaaggaggatggtaacatcctgggccacaagctggagtacaactacaactcccacaacgtctatattatggcggataagcagaagaatggcattaaggttaacttcaagatccgccataatatagaggacgggtccgttcagctggcggatcactaccagcagaacacacccatcggtgacggacccgtcctcctgccggacaatcactacttgtccacgcagtccgcgctctcaaaggaccccaatgagaagcgcgatcacatggtcctgctggagttcgtcacagccgcagggataactctgggcatggacgaactctacaagcgctcgcgcgacatctcccacgggtttccacccgcagtcgcggcgcaggacgatgggacactccccatgtcctgcgcgcaggagtccggcatggatagacatcctgccgcttgcgcgagcgccaggatcaacgtgtga

SEQ ID NO: 1018 - DNA, 855 bp, Artificial Sequence
  Modified Open Reading Frame
atggtatctaagggcgaggagctgtttacgggcgtcgtccccatcctcgtcgagctagacggagacgtgaacggtcacaagttctccgtctccggtgagggtgagggcgacgccacgtacggcaagctcacattgaagttcatatgtacaacgggcaagctgcccgtgccatggcccaccctcgtaactaccctcacgtacggtgtccagtgtttctcgcgctacccggaccatatgaagcagcacgacttcttcaagtccgcgatgcccgagggctacgtccaggagcgcacaatcttcttcaaagacgatggaaactacaagactcgtgcggaggtgaagttcgagggcgacacccttgtcaaccgaatcgagctgaaaggcatcgacttcaaggaggatggcaacatcctgggccataagctggagtacaactacaactcccacaacgtctatattatggcggataagcagaagaatggcattaaggtcaacttcaagatccgccataatatagaggacgggtccgttcagctggcggatcactaccagcagaacacacccatcggtgacggacccgtcctcctgccggacaatcactacttgtccacgcagtccgcgctctcaaaggaccccaatgagaagcgcgatcacatggtcctgctggagttcgtcacagccgcagggataactctgggcatggacgaactctacaagcgctcgcgcgacatctcccacgggtttccacccgcagtcgcggcgcaggacgatgggacactccccatgtcctgcgcgcaggagtccggcatggatagacatcctgccgcttgcgcgagcgccaggatcaacgtgtga

SEQ ID NO: 1019 - DNA, 855 bp, Artificial Sequence
  Modified Open Reading Frame
atggtatctaagggcgaggagctgtttacgggcgtcgtccccatcctcgtcgagctagacggagacgtgaacggtcacaagttctccgtctccggtgagggtgagggcgacgccacgtacggcaagctcacattgaagttcatatgtacaacgggcaagctgcccgtgccatggcccaccctcgtaactaccctcacgtacggtgtccagtgtttctcgcgctacccggaccatatgaagcagcacgacttcttcaagtccgcgatgcccgagggctacgtccaggagcgcacaatcttcttcaaagacgatggaaactacaagactcgtgcggaggtgaagttcgagggcgacacccttgtcaaccgaatcgagctgaaaggcatcgacttcaaggaggatggcaacatcctgggccataagctggagtacaactacaactcccacaacgtctatattatggcggataagcagaagaatggcattaaggtcaacttcaagatccgccataatatagaggacgggtccgtccagctggcggaccactaccagcagaacacccccatcggcgacggacccgtcctcctgccggacaatcactacttgtccacgcagtccgcgctctcaaaggaccccaatgagaagcgcgatcacatggtcctgctggagttcgtcactgccgcggggataaccctcggcatggacgaactctacaagcgctcgcgcgacatctcccacgggtttccacccgcagtcgcggcgcaggacgatgggacactccccatgtcctgcgcgcaggagtccggcatggatagacatcctgccgcttgcgcgagcgccaggatcaacgtgtga

SEQ ID NO: 1020 - DNA, 855 bp, Artificial Sequence
  Modified Open Reading Frame
atggtatctaagggcgaggagctgtttacgggcgtcgtccccatcctcgtcgagctagacggagacgtgaacggtcacaagttctccgtctccggtgagggtgagggcgacgccacgtacggcaagctcacattgaagttcatatgtacaacgggcaagctgcccgtgccatggcccaccctcgtaactaccctcacgtacggtgtccagtgtttctcgcgctacccggaccatatgaagcagcacgacttcttcaagtccgcgatgcccgagggctacgtccaggagcgcacaatcttcttcaaagacgatggaaactacaagacacgtgcggaggtgaagttcgagggcgacacccttgtcaaccgaatcgagctgaaaggcatcgacttcaaggaggatggcaacatcctgggccataagctggagtacaactacaactcccacaacgtctatattatggcggataagcagaagaatggcattaaggtcaacttcaagatccgccataatatagaggacgggtccgtccagctggcggaccactaccagcagaacacccccatcggcgacggacccgtcctcctgccggacaatcactacttgtccacgcagtccgcgctctcaaaggaccccaatgagaagcgcgatcacatggtcctgctggagttcgtcactgccgcggggataaccctcggcatggacgaactctacaagcgctcgcgcgacatctcccacgggtttccacccgcagtcgcggcgcaggacgatgggacactccccatgtcctgcgcgcaggagtccggcatggatagacatcctgccgcttgcgcgagcgccaggatcaacgtgtga

SEQ ID NO: 1021 - DNA, 855 bp, Artificial Sequence
  Modified Open Reading Frame
atggtatctaagggcgaggagctgtttacgggcgtcgtccccatcctcgtcgagctagacggagacgtgaacggtcacaagttctccgtctccggtgagggtgagggcgacgccacgtacggcaagctcacattgaagttcatatgtacaacgggcaagctgcccgtgccatggcccaccctcgtaactaccctcacgtacggtgtccagtgtttctcgcgctacccggaccatatgaagcagcacgacttcttcaagtccgcgatgcccgagggctacgtccaggagcgcaccatcttcttcaaagacgatggaaactacaagacacgtgcggaggtgaagttcgagggcgacacccttgtcaaccgaatcgagctgaaaggcatcgacttcaaggaggatggcaacatcctgggccataagctggagtacaactacaactcccacaacgtctatattatggcggataagcagaagaatggcattaaggtcaacttcaagatccgccataatatagaggacgggtccgtccagctggcggaccactaccagcagaacacccccatcggcgacggacccgtcctcctgccggacaatcactacttgtccacgcagtccgcgctctcaaaggaccccaatgagaagcgcgatcacatggtcctgctggagttcgtcactgccgcggggataaccctcggcatggacgaactctacaagcgctcgcgcgacatctcccacgggtttccacccgcagtcgcggcgcaggacgatgggacactccccatgtcctgcgcgcaggagtccggcatggatagacatcctgccgcttgcgcgagcgccaggatcaacgtgtga

SEQ ID NO: 1022 - DNA, 855 bp, Artificial Sequence
  Modified Open Reading Frame
atggtcagcaaaggagaggagctattcacaggtgtggtcccgatcctagtcgagctggacggagacgtcaatggccataagttttccgtgagtggcgaaggcgagggcgacgccacttacggaaaactcaccctcaaatttatttgtaccactgggaaactcccagtgccctggcctactcttgtgacgacactgacatacggtgtgcagtgtttttctcgctacccggaccatatgaagcagcacgatttttttaaatcggctatgccggagggctacgtccaggagcgaaccatcttctttaaagatgatggtaattacaagactagggcagaggttaagtttgagggtgacacattggtcaatcgtattgagctgaagggaattgactttaaggaggatggtaatatactcgggcacaagctcgagtataactataactcccataatgtatacattatggccgataagcaaaaaaacggcattaaagtcaatttcaaaattcggcacaatatcgaagacggctccgtccagctcgcggatcactaccagcagaacacgccgataggcgatggccctgtactgctgccagataaccattatctgagcacgcagtcggcgctgtcaaaggacccaaacgaaaagagggaccacatggtccttcttgagtttgtgacagcggcggggatcacacttggaatggatgaattatacaaacgatcccgggacatcagccacggctttcctccggccgtggctgcgcaggatgacgggacattgccgatgtcttgtgctcaagaatcggggatggaccgtcatcctgcggcttgtgcgtccgcgaggatcaatgtatga

SEQ ID NO: 1023 - DNA, 855 bp, Artificial Sequence
  Modified Open Reading Frame
atggttagtaagggcgaggagctcttcaccggcgtggtgcctatactggtggagctggacggcgacgtgaacggccacaagtttagcgtgtccggagagggcgagggcgacgccacctatggcaagctgaccttgaagttcatctgcactaccggcaaactgccagtgccgtggcccacgttggttaccaccctgacctacggagtccagtgcttcagcagataccccgaccacatgaagcagcacgacttcttcaagtctgccatgcccgagggctacgtccaggaaagaaccatcttctttaaggacgatggcaactataagactcgtgccgaggtgaagttcgagggtgacaccctggtgaacaggatcgagctgaagggcattgacttcaaagaggatggtaacatactgggccacaaactggagtacaactacaacagtcataacgtgtacatcatggccgataaacagaagaacgggatcaaggtgaactttaagatcagacataatatcgaggacggcagcgtgcagctcgccgaccactaccagcagaacacacccatcggcgacggacccgtgctgctgcccgataatcactacctgtcgacccagtccgccctctccaaggaccctaacgagaagagagatcacatggtgctgctcgagttcgtgaccgccgccggcatcaccttgggcatggacgagctgtacaagagatcccgcgacatcagccacggctttcctcccgccgtggccgcccaagacgacgggaccctgcccatgagctgcgcgcaggagtccggcatggatagacatcctgccgcctgtgccagcgccaggatcaacgtgtaa

SEQ ID NO: 1024 - DNA, 855 bp, Artificial Sequence
  Modified Open Reading Frame
atggtatcgaagggggaagagctgttcactggcgtcgtgccgatcctggtggagcttgacggtgatgtaaatggacataagttctcagtgtcgggtgagggcgagggtgacgctacctatggtaagctcaccctcaagttcatttgcaccaccggcaagctccctgtcccgtggccgactcttgtcactacattgacatatggagttcaatgcttcagtcggtatcccgaccacatgaagcagcacgacttttttaagtcggccatgcccgagggttatgtccaggagcgtaccatcttcttcaaggatgatggtaactataagactcgagccgaggtcaagttcgaaggcgacacgctggtgaatcgcatcgaactgaagggcatcgattttaaggaggatggcaacatcctcggtcacaaactcgagtataactataatagccataatgtttacattatggcagacaagcagaaaaacggcatcaaggtgaactttaagatccggcacaatatagaggacgggtccgtccagctggcagaccactaccagcagaatacaccgataggggacggacccgtcctcttgccggataatcactacttgagcacgcagtctgccttgtctaaagatcccaatgagaagagggatcatatggttttactcgagtttgtgaccgctgctggcataaccctgggcatggatgaactctataagcggtcacgggacataagccacggcttccctccagccgtggctgcgcaagacgatgggacgctcccaatgtcttgcgcccaggagtccggcatggaccgccacccagcagcgtgcgcctcggcgcgcatcaacgtatag

SEQ ID NO: 1025 - DNA, 855 bp, Artificial Sequence
  Modified Open Reading Frame
atggtatcaaaaggcgaggaattgtttactggtgtagtccctatccttgttgaactggacggtgacgttaatggacacaaattttctgtctctggcgaaggagaaggcgatgctacttatgggaaacttactctaaaattcatatgcacgacaggcaaattgcctgtcccatggcctacgctcgtgaccacgttaacgtatggagtgcagtgcttcagccggtatccagatcacatgaaacaacatgacttctttaaatcggctatgcccgaaggctatgtgcaggagcgaacaatcttctttaaagatgacggcaattacaagacaagagctgaagttaagtttgagggagatacgctagtcaaccgcatagagttgaagggtatagattttaaggaagacgggaacatactgggccataagcttgaatacaattataactcacacaacgtctacattatggcggataagcaaaagaatggaatcaaggtaaacttcaaaattcgacacaatattgaggacggatccgtgcagctagcagatcactaccagcagaatactcccatcggtgacgggccagtacttctgcccgacaaccattacttatccacccagtccgcactctcgaaggatcctaatgagaaacgagatcacatggtcctcttggaatttgttaccgcagcaggcatcactctaggaatggatgagttgtacaaacggagtagagatatcagccatggcttcccaccagcagttgcagcgcaagatgacggaactttgccaatgtcctgtgcacaggaatcagggatggatagacaccccgcggcctgcgccagcgcacgtataaatgtgtaa

SEQ ID NO: 1026 - DNA, 855 bp, Artificial Sequence
  Modified Open Reading Frame
atggtgagcaagggagaggagctttttacaggggtggttccgatactggtagagttggacggcgacgtgaacgggcacaagttttctgtgagtggtgagggtgaaggtgacgccacatacggcaagctgacgttaaaattcatatgtacgacgggtaagttaccggtgccatggccgacgctggtcaccactctgacctatggggtccagtgcttctctcggtatccggaccatatgaaacagcatgacttctttaagagtgctatgcctgaaggttatgtccaggagcgtaccatcttctttaaagacgatggtaactacaaaacgagggccgaggtgaagttcgaaggcgacaccttggtcaatcgtattgagttgaagggcatcgactttaaagaagatggtaacattcttggacataagcttgagtataactataacagtcataatgtttacataatggcggataagcagaagaatggcatcaaggtaaactttaaaatccgtcataacattgaagacggcagtgtgcagttggcggaccattaccagcaaaacacacccataggagacggtcccgttctgttgccggacaaccactacctaagtacgcaatcagccctgtcaaaggatcctaacgaaaagagggaccatatggtccttcttgagtttgtcaccgccgccgggatcacgctgggcatggatgagctttataagcgcagccgtgacatcagccatggcttcccgccggcggtggccgcgcaggacgacgggaccctgcccatgagctgtgctcaagagtccggcatggacaggcatcccgccgcctgtgcgtctgcgcgtataaacgtgtag

SEQ ID NO: 1027 - DNA, 855 bp, Artificial Sequence
  Modified Open Reading Frame
atggtatcaaaaggcgaggaattgtttactggtgtagtccctatccttgttgaactggacggtgacgttaatggacacaaattttctgtctctggcgaaggagaaggcgatgctacttatgggaaacttactctaaaattcatatgcacgacaggcaaattgcctgtcccatggcctacgctcgtgaccacgttaacgtatggagtgcagtgcttcagccggtatccagatcacatgaaacaacatgacttctttaaatcggctatgcccgaaggctatgtgcaggagcgaacaatcttctttaaagatgacggcaattacaagacaagagctgaagttaagtttgagggagatacgctagtcaaccgcatagagttgaagggtatagattttaaggaagacgggaacatactgggccataagcttgaatacaattataactcacacaacgtctacattatggcggataagcaaaagaatggaatcaaggtaaacttcaaaatacgacacaatattgaggacggatccgtgcagctagcagatcactaccagcagaatactcccatcggtgacgggccagtacttctgcccgacaaccattacttatccacccagtccgcactctcgaaggatcctaatgagaaacgagatcacatggtcctcttggaatttgttaccgcagcaggcatcactctaggaatggatgagttgtacaaacggagtagagatatcagccatggcttcccaccagcagttgcagcgcaagatgacggaactttgccaatgtcctgtgcacaggaatcagggatggatagacaccccgcggcctgcgccagcgcacgtataaatgtgtaa

SEQ ID NO: 1028 - DNA, 855 bp, Artificial Sequence
  Modified Open Reading Frame
atggtatcaaaaggcgaggaattgtttactggtgtagtccctatccttgttgaactggacggtgacgttaatggacacaaattttctgtctctggcgaaggagaaggcgatgctacttatgggaaacttactctaaaattcatatgcacgacaggcaaattgcctgtcccatggcctacgctcgtgaccacgttaacgtatggagtgcagtgcttcagccggtatccagatcacatgaaacaacatgacttctttaaatcggctatgcccgaagggtatgtgcaggagcgaacaatcttctttaaagatgacggcaattacaagacaagagctgaagttaagtttgagggagatacgctagtcaaccgcatagaattgaagggtatagattttaaggaagacgggaacatactgggccataagcttgaatacaattataactcacacaacgtctacattatggcggataagcaaaagaatggaatcaaggtaaacttcaaaatacgacacaatattgaggacggatccgtgcagctagcagatcactaccagcagaatactcccatcggtgacgggccagtacttctgcccgacaaccattacttatccacccagtccgcactctcgaaggatcctaatgagaaacgagatcacatggtcctcttggaatttgttaccgcagcaggcatcactctaggaatggatgagttgtacaaacggagtagagatatcagccatggcttcccaccagcagttgcagcgcaagatgacggaactttgccaatgtcctgtgcacaggaatcagggatggatagacaccccgcggcctgcgccagcgcacgtataaatgtgtaa

SEQ ID NO: 1029 - DNA, 855 bp, Artificial Sequence
  Modified Open Reading Frame
atggtatcaaaaggcgaggaattgtttactggtgtagtccctatccttgttgaactggacggtgacgttaatggacacaaattttctgtctctggcgaaggagaaggcgatgctacttatgggaaacttactctaaaattcatatgcacgacaggcaaattgcctgtcccatggcctacgctcgtgaccacgttaacgtatggagtgcagtgcttcagcaggtatccagatcacatgaaacaacatgacttctttaaatcggctatgcccgaagggtatgtgcaggagcgaacaatcttctttaaagatgacggcaattacaagacaagagctgaagttaagtttgagggagatacgctagtcaaccgcatagaattgaagggtatagattttaaggaagacgggaacatactgggccataagcttgaatacaattataactcacacaacgtctacattatggcggataagcaaaagaatggaatcaaggtaaacttcaaaatacgacacaatattgaggacggatccgtgcagctagcagatcactaccagcagaatactcccatcggtgacgggccagtacttctgcccgacaaccattacttatccacccagtccgcactctcgaaggatcctaatgagaaacgagatcacatggtcctcttggaatttgttactgcagcaggcatcactctaggaatggatgagttgtacaaacggagtagagatatcagccatggcttcccaccagcagttgcagcgcaagatgacggaactttgccaatgtcctgtgcacaggaatcagggatggatagacaccccgcggcctgcgccagcgcacgtataaatgtgtaa

SEQ ID NO: 1030 - DNA, 855 bp, Artificial Sequence
  Modified Open Reading Frame
atggtatcaaaaggcgaggaattgtttactggtgtagtccctatcctagttgaactggacggtgacgttaatggacacaaattttctgtctctggcgaaggagaaggcgatgctacttatgggaaacttactctaaaattcatatgcacgacaggcaaattgcctgtcccatggcctacgctcgtgaccacgttaacgtatggagtgcagtgcttcagcaggtatccagatcacatgaaacaacatgacttctttaaatcggctatgcccgaagggtatgtgcaggagcgaacaatcttctttaaagatgacggcaattacaagacaagagctgaagttaagtttgagggagatacgctagtcaaccgcatagaattgaagggtatagattttaaggaagacgggaacatactgggccataagcttgaatacaattataactcacacaacgtctacattatggcggataagcaaaagaatggaatcaaggtaaacttcaaaatacgacacaatattgaggacggatccgtgcagctagcagatcactaccagcagaatactcccatcggtgacgggccagtacttctgcccgacaaccattacttatccacccagtccgcactctcgaaggatcctaatgagaaacgagatcacatggtcctcttggaatttgttactgcagcaggcatcactctaggaatggatgagttgtacaaacggagtagagatatcagccatggcttcccaccagcagttgcagcgcaagatgacggaactttgccaatgtcctgtgcacaggaatcagggatggatagacaccccgcggcctgcgccagcgcacgtataaatgtgtaa

SEQ ID NO: 1031 - DNA, 855 bp, Artificial Sequence
  Modified Open Reading Frame
atggtatcaaaaggcgaggaattgtttactggtgtagtccctatcctagttgaactggacggtgacgttaatggacataaattttctgtctctggcgaaggagaaggcgatgctacttatgggaaacttactctaaaattcatatgcacgacaggcaaattgcctgtcccatggcctacgctcgtgaccacgttaacgtatggagtgcagtgcttcagcaggtatccagatcacatgaaacaacatgacttctttaaatcggctatgcccgaagggtatgtgcaggagcgaacaatcttctttaaagatgacggcaattacaagacaagagctgaagttaagtttgagggagatacgctagtcaaccgcatagaattgaagggtatagattttaaggaagacgggaacatactgggccataagcttgaatacaattataactcacacaacgtctacattatggcggataagcaaaagaatggaatcaaggtaaacttcaaaatacgacacaatattgaggacggatccgtgcagctagcagatcactaccagcagaatactcccatcggtgacgggccagtacttctgcccgacaaccattacttatccacccagtccgcactctcgaaggatcctaatgagaaacgagatcacatggtcctcttggaatttgttactgcagcaggcatcactctaggaatggatgagttgtacaaacggagtagagatatcagccatggcttcccaccagcagttgcagcgcaagatgacggaactttaccaatgtcctgtgcacaggaatcagggatggatagacaccccgcggcctgcgccagcgcacgtataaatgtgtaa

SEQ ID NO: 1032 - DNA, 855 bp, Artificial Sequence
  Modified Open Reading Frame
atggtgagtaaaggcgaagagctgttcactggagtcgtgcccatactcgttgaactggacggagatgtgaatggtcacaaattctccgtctcaggtgagggtgagggcgatgccacgtatggcaagctcaccctcaagttcatctgtaccactggcaaattgccagtgccttggcccacgcttgtgaccacgttgacctatggagtacagtgcttctcgcgctaccccgaccacatgaagcagcacgacttttttaagtcggccatgccggaggggtacgtgcaagaacgcactatattcttcaaggacgacgggaattacaagacgcgggccgaggtaaaattcgagggggacacattggtcaatagaatcgaactcaaggggatcgattttaaagaggacgggaacatcctcggtcacaagttggagtacaactacaacagccataatgtctacattatggctgacaagcagaagaatggcatcaaagtcaacttcaaaatacgtcacaatattgaggacgggagtgttcagttggcagatcactaccaacagaacactccgatcggggatgggcccgtcctcttgccggacaatcactatttgtccacgcaatcggcgctctcaaaggatcccaatgagaagcgcgaccatatggtcctcctcgagttcgtcactgcagcgggcataacgctgggtatggatgagctgtacaagcgcagcagggatatatcccacggattcccccctgctgtcgctgcacaggacgatgggactctcccaatgtcctgtgctcaagaatcgggtatggaccgacatccagcggcatgcgcttccgcacgtataaacgtgtga

SEQ ID NO: 1033 - DNA, 855 bp, Artificial Sequence
  Modified Open Reading Frame
atggtatcaaaaggcgaggaattgtttactggtgtagtccctatcctagttgaactggacggtgacgttaatggacataaattttctgtctctggcgaaggagaaggcgatgctacttatgggaaacttactctaaaattcatatgcacgacaggcaaattgcctgtcccatggcctacgctcgtgaccacgttaacgtatggagtgcagtgcttcagcaggtatccagatcacatgaaacaacatgacttctttaaatcggctatgcccgaagggtatgtgcaggagcgaacaatcttctttaaagatgacggcaattacaagacaagagctgaagttaagtttgagggagatacgctagtcaaccgcatagaattgaagggtatagattttaaggaagacgggaacatactgggccataagcttgaatacaattataactcacacaacgtctacattatggcggataagcaaaagaatggaatcaaggtaaacttcaaaatacgacacaatattgaggacggatcagtgcagctagcagatcactaccagcagaatactcccataggtgacgggccagtacttctgccggacaaccattacttatccacccagtccgcactctcgaaggatcctaatgagaaacgagatcacatggtcctcttggaatttgttactgcagcaggcatcactctaggaatggatgagttgtacaaacggagtagagatatcagccatggcttcccaccagcagttgcagcgcaagatgacggaactttaccaatgtcctgtgcacaggaatcagggatggatagacaccccgcggcctgcgccagcgcacgtataaatgtgtaa

SEQ ID NO: 1034 - DNA, 855 bp, Artificial Sequence
  Modified Open Reading Frame
atggtatcaaaaggcgaggaattgtttactggtgtagtccctatcctagttgaactggacggtgacgttaatggacataaattttctgtctctggcgaaggagaaggcgatgctacttatgggaaacttactctaaaattcatatgcacgacaggcaaattgcctgtcccatggcctacgctcgtgaccacgttaacgtatggagtgcagtgcttcagcaggtatccagatcacatgaaacaacatgacttctttaaatcggctatgcccgaagggtatgtgcaggagcgaacaatcttctttaaagatgacggcaattacaagacaagagctgaagttaagtttgagggagatacgctagtcaaccgcatagaattgaagggtatagattttaaggaagacgggaacatactgggccataagcttgaatacaattataactcacacaacgtctacattatggcggataagcaaaagaatggaatcaaggtaaacttcaaaatacgacacaatattgaggacggatcagtgcagctagcagatcactaccagcagaatactcccataggtgacgggccagtacttctgcccgacaaccattacttatccacccagtccgcactctcgaaggatcctaatgagaaacgagatcacatggtcctcttggaatttgttactgcagcaggcatcactctaggaatggatgagttgtacaaacggagtagagatatcagccatggcttcccaccagcagttgcagcgcaagatgacggaactttaccaatgtcctgtgcacaggaatcagggatggatagacaccccgcggcctgcgccagcgcacgtataaatgtgtaa

SEQ ID NO: 1035 - DNA, 855 bp, Artificial Sequence
  Modified Open Reading Frame
atggtatcaaaaggcgaggaattgtttactggtgtagtccctatcctagttgaactggacggtgacgttaatggacataaattttctgtctctggcgaaggagaaggcgatgctacttatgggaaacttactctaaaattcatatgcacgacaggcaaattgcctgtcccatggcctacgctcgtgaccacgttaacgtatggagtgcagtgcttcagcaggtatccagatcacatgaaacaacatgacttctttaaatcggctatgcccgaagggtatgtgcaggagcgaacaatcttctttaaagatgacggcaattacaagacaagagctgaagttaagtttgagggcgatacgctagtcaaccgcatagaattgaagggtatagattttaaggaagacgggaacatactgggccataagcttgaatacaattataactcacacaacgtctacattatggcggataagcaaaagaatggaataaaggtaaacttcaaaatacgacacaacattgaggacggatcagtgcagctagcagatcactaccaacagaatactcccataggtgacgggccagtacttctgcccgacaaccattacttatccacccagtccgcactctcgaaggatcctaatgagaaacgagatcacatggtcctcttggaatttgttactgcagcaggcatcactctaggaatggatgagttgtacaaacggagtagagatatcagccatggcttcccaccagcagttgcagcgcaagatgacggaactttaccaatgtcctgtgcacaggaatcagggatggatagacaccccgcggcctgcgccagcgcacgtataaatgtgtaa

SEQ ID NO: 1036 - DNA, 855 bp, Artificial Sequence
  Modified Open Reading Frame
atggtatcaaaaggcgaggaattgtttactggtgtagtccctatcctagttgaactggacggtgacgttaatggacataaattttctgtctctggcgaaggagaaggcgatgctacttatgggaaacttactctaaaattcatatgcacgacaggcaaattgcctgtcccatggcctacgctcgtgaccacgttaacgtatggagtgcagtgcttcagcaggtatccagatcacatgaaacaacatgacttctttaaatcggctatgcccgaagggtatgtgcaggagcgaacaatcttctttaaagatgacggcaattacaagacaagagccgaagttaaatttgagggcgatacgctagtcaaccgcatagaattgaagggtatagattttaaggaagacgggaacatactgggccataagcttgaatacaattataactcacacaacgtctacattatggcggataagcaaaagaatggaataaaggtaaacttcaaaatacgacacaacattgaggacggatcagtgcagctagcagatcactaccaacagaatactcccataggtgacgggccagtacttctgcccgacaaccattacttatccacccagtccgcactctcgaaggatcctaatgagaaacgagatcacatggtcctcttggaatttgttactgcagcaggcatcactctaggaatggatgagttgtacaaacggagtagagatatcagccatggcttcccaccagcagttgcagcgcaagatgacggaactttaccaatgtcctgtgcacaggaatcagggatggatagacaccccgcggcctgcgccagcgcacgtataaatgtgtaa

SEQ ID NO: 1037 - DNA, 855 bp, Artificial Sequence
  Modified Open Reading Frame
atggtttccaagggcgaggagctgttcacaggcgtggtgcctatcctggtggagctggacggcgacgtgaacggccacaagtttagcgtgtccggcgagggcgaaggcgacgccacctacggcaagctgaccctgaagttcatctgcaccactggcaagttgcctgtgccctggcccaccctcgtgaccaccctgacctatggagtacagtgcttcagcagataccccgaccacatgaagcagcacgacttcttcaagtccgccatgcccgagggctacgtccaggaaagaaccatcttctttaaagacgatggaaactataagacccgagccgaggtcaagttcgagggtgacaccctggtgaacagaatcgagctcaagggcatcgactttaaagaagatggtaacatcctgggccacaaactggagtacaactacaacagccacaacgtgtacatcatggccgacaaacagaagaacgggatcaaggtgaactttaagatcaggcacaatatcgaggacggcagcgtgcagctcgccgatcactaccagcagaacacaccgatcggcgacggccccgtgctgctgcccgataaccattacctgagcacccagagcgccctgtccaaggaccccaacgagaagagagatcacatggtgctgctcgagttcgtgaccgccgccggcatcaccctgggcatggacgagctgtacaagaggtcccgcgacataagccacggctttcctccagccgtggccgcccaagacgacgggaccctgcccatgagctgcgcccaggagtccggcatggatagacatcccgccgcctgtgccagcgcaaggattaatgtgtaa

SEQ ID NO: 1038 - DNA, 855 bp, Artificial Sequence
  Modified Open Reading Frame
atggtatccaagggcgaggagctgttcacaggcgtggtgcctatcctggtggagctggacggcgacgtgaacggccacaagtttagcgtgtccggagagggcgaaggcgacgccacctatggcaagctgaccttgaagttcatctgcactaccggcaaactgcccgtgccctggcccaccctcgtgaccaccctgacttacggagtccagtgcttcagcagataccccgaccacatgaagcagcacgacttctttaagtccgccatgcccgagggctacgtgcaggaaagaaccatcttctttaaagacgatggaaactataagacccgagccgaggtgaagttcgagggagacaccctcgtgaatcgcatcgagctcaagggcatcgactttaaagaagatggtaatatcctgggccacaaactggagtacaactacaacagccacaacgtgtacatcatggccgacaagcagaagaacggtatcaaggtgaactttaagatcagacacaacatcgaggacggcagcgtgcagctcgccgatcactaccagcagaacacaccgatcggcgacggccccgtgctgctgcccgacaaccattacctgagcactcagagcgccctttccaaggaccctaacgagaagagagatcacatggtgctgctcgagttcgtgaccgccgccggcatcaccctgggcatggacgagctctacaagaggtcccgcgacatcagccacggctttcctccagccgtggctgcccaagacgacgggacccttcccatgagctgcgcccaggagtccggcatggataggcaccccgccgcctgtgccagcgcccggatcaatgtgtaa

SEQ ID NO: 1039 - DNA, 855 bp, Artificial Sequence
  Modified Open Reading Frame
atggttagtaaaggcgaagagctcttcacgggcgtggtgccgattctggtggagcttgacggtgatgtaaatggacataagttttcagtttccggtgagggcgaaggagacgccacttacgggaaactgacgcttaagttcatttgcaccaccggcaagcttccagtgccgtggcctacgttggttaccaccctaacctatggagtccagtgcttttcaaggtatcccgaccatatgaagcagcatgacttcttcaagtcggcgatgcctgaaggatatgtacaggaacgtacaatattcttcaaggacgacgggaactataaaacccgggccgaggtgaagtttgagggcgacaccttggtcaatcgtatcgagttgaaaggcattgacttcaaggaggatggtaacatactaggccacaagctggagtataattacaacagccataatgtttacattatggctgataaacagaagaatgggatcaaagtcaatttcaagatccgtcacaacattgaggacggatctgtgcaattggctgaccattaccagcagaatacacctattggtgacgggcctgtcctgctaccggacaaccattatctgtccacccagagtgccctgtcgaaggacccgaacgaaaagcgggaccatatggtcctgcttgagttcgtcactgcggcagggatcactctgggtatggacgagctgtataagcggtcgcgggatatcagccatggtttcccgccggccgttgcagctcaagatgatggtaccctgcccatgtcgtgtgcgcaggagtccggtatggacaggcacccggcagcatgcgcgtctgcacgtataaacgtgtag

SEQ ID NO: 1040 - DNA, 855 bp, Artificial Sequence
  Modified Open Reading Frame
atggtttctaaaggtgaggagcttttcactggcgtcgtccccatcctcgtcgaacttgacggtgacgtcaatggacacaagttttctgtgtccggcgagggtgagggcgacgccacgtacggtaaacttactcttaagtttatctgtacgactggaaagctccctgttccctggccgactttggtgactaccctgacgtacggggtgcagtgcttcagtcggtatcccgatcatatgaagcagcacgacttttttaagtcggcgatgccggagggatatgtccaggagcgcaccatcttctttaaggatgatggcaattataagaccagggccgaggtcaagttcgaaggggatacccttgtgaacaggatcgagcttaaaggtattgatttcaaggaggacgggaacatcctcggtcataagctggagtataattacaacagccacaacgtctatattatggcggataagcagaagaatggcattaaggtcaacttcaagatccgccataatatagaggatgggagtgttcagctggcagatcactaccagcagaacactccgatcggggatggtcccgtcctccttcctgataatcattacctctcgacccagagcgctctctcgaaggatcccaacgagaagcgcgaccatatggtcctgttagagttcgtcactgccgcagggattaccctgggcatggacgaactctataagcgctcccgggacatatcccacggcttccctcctgcggtcgcagctcaggacgacggtacgttgcccatgagctgcgcgcaggagagcggcatggatcggcatcctgccgcttgtgcttctgcacgtattaacgtgtag

SEQ ID NO: 1041 - DNA, 855 bp, Artificial Sequence
  Modified Open Reading Frame
atggtgtccaagggcgaggagcttttcactggcgtcgtccccatcctcgtcgaacttgacggtgacgtcaatggacacaagttttctgtgtccggcgagggtgagggcgacgccacgtacggtaaacttactcttaagtttatctgtacgactggaaagctccccgtcccttggcccaccctcgtcactactttgacgtatggcgtacagtgcttcagtcggtatcccgaccatatgaagcagcacgacttttttaagtcggcgatgccggagggatatgtccaggagcgcaccatcttctttaaggatgatggcaattataagaccagggccgaggtcaagttcgaaggggatacccttgtgaacaggatcgagcttaaaggtattgatttcaaggaggacgggaacatcctcggtcataagctggagtataattacaacagccacaacgtctatattatggcggataagcagaagaatggcattaaggtcaacttcaagatccgccataatatagaggatgggagtgttcagctggcagatcactaccagcagaacactccgatcggggatggtcccgtcctccttcctgataatcattacctctcgacccagagcgctctctcgaaggatcccaacgagaagcgcgaccatatggtcctgttagagttcgtcactgccgcagggattaccctgggcatggacgaactctataagcgctcccgggacatatcccacggcttccctcctgcggtcgcagctcaggacgacggtacgttgcccatgagctgcgcgcaggagagcggcatggatcggcatcctgccgcgtgcgcctctgcacgtattaacgtgtag

SEQ ID NO: 1042 - DNA, 855 bp, Artificial Sequence
  Modified Open Reading Frame
atggtgtccaagggcgaggagcttttcactggcgtcgtccccatcctcgtcgaacttgacggtgacgtcaatggacacaagttttctgtgtccggcgagggtgagggcgacgccacgtacggtaaacttactcttaagtttatctgtacgactggaaagctccccgtcccttggcccaccctcgtcactactttgacgtatggcgtacagtgcttcagtcggtatcccgaccatatgaagcagcacgacttttttaagtcggcgatgccggagggatatgtccaggagcgcaccatcttctttaaggatgatggcaattataagaccagggccgaggtcaagttcgaaggggatacccttgtgaacaggatcgagcttaaaggtattgatttcaaggaggacgggaacatcctcggtcataagctggagtataattacaacagccacaacgtctatattatggcggataagcagaagaatggcattaaggtcaacttcaagatccgccataatatagaggatgggagtgttcagctggcagatcactaccagcagaacactccgatcggggatggtcccgtcctccttcctgataatcattacctctcgacccagagcgctctctcgaaggatcccaacgagaagcgcgaccatatggtcctgttagagttcgtcactgccgcagggattaccctgggcatggacgaactctataagcgctcccgggacatatcccacggcttccctcctgcggtcgccgctcaggacgacggcacgcttcctatgtcgtgcgcgcaggagagcggcatggatcggcatcctgccgcgtgcgcctctgcacgtattaacgtgtag

SEQ ID NO: 1043 - DNA, 855 bp, Artificial Sequence
  Modified Open Reading Frame
atggtatcgaaaggagaggagcttttcacaggggtggttccgatactggtagagttggacggcgacgtgaacgggcacaagttttcggtgagcggtgagggtgaaggtgacgccacctacggcaagctgacgttgaagttcatatgtacgacgggtaagttgccggtgccgtggccgacgctggtcaccactctgacctacggggtccagtgcttctctagatatccggaccatatgaagcagcatgacttctttaagagtgctatgcctgaaggttatgtccaggagcgtaccatcttctttaaagacgatggtaactacaagacgagggccgaggtgaagttcgagggcgacaccttggtcaatcgtattgagttgaagggcatcgactttaaagaagatggtaacattcttggacataagcttgagtataactataacagtcataatgtttacatcatggcggataagcagaagaacggcatcaaggtaaactttaagatccgtcacaacattgaagacggcagcgtgcagttggcggaccattaccagcagaacacgcccatcggagacggtcccgttctgttgccggacaaccactacctgagtacgcaatcagccctgtcaaaggatcctaacgaaaagagggaccacatggtccttcttgagttcgtcaccgccgccgggatcacgctgggcatggatgagctttacaagcgcagccgtgacatcagccatggcttcccgccggcggtggcagcgcaggacgacgggaccctgcccatgagctgcgctcaggagtccggcatggacaggcatcccgccgcctgtgcgtctgcgcgtatcaacgtgtag

SEQ ID NO: 1044 - DNA, 855 bp, Artificial Sequence
  Modified Open Reading Frame
atggtatcgaagggcgaggagcttttcacaggggtggttccgatactggtagagttggacggcgacgtgaacgggcacaagttttcggtgagcggtgagggtgaaggtgacgccacctacggcaagctgacgttgaagttcatatgtacgacgggtaagttgccggtgccgtggccgacgctggtcaccactctgacctacggggtccagtgcttctctagatatccggaccatatgaagcagcatgacttctttaagagtgctatgcctgaaggttatgtccaggagcgtaccatcttctttaaagacgatggtaactacaagacgagggccgaggtgaagttcgagggcgacaccttggtcaatcgtattgagttgaagggcatcgactttaaagaagatggtaacattcttggacataagcttgagtataactataacagtcataatgtttacatcatggcggataagcagaagaacggcatcaaggtaaactttaagatccgtcacaacattgaagacggcagcgtgcagttggcggaccattaccagcagaacacgcccatcggagacggtcccgttctgttgccggacaaccactacctgagtacgcaatcagccctgtcaaaggatcctaacgaaaagagggaccacatggtccttcttgagttcgtcaccgccgccgggatcacgctgggcatggatgagctttacaagcgcagccgtgacatcagccatggcttcccgccggcggtggccgcgcaggacgacgggaccctgcccatgagctgcgctcaggagtccggcatggacaggcatcccgccgcctgtgcgtctgcgcgtatcaacgtgtag

SEQ ID NO: 1045 - DNA, 855 bp, Artificial Sequence
  Modified Open Reading Frame
atggtgtccaagggcgaggagcttttcacaggggtggttccgatactggtagagttggacggcgacgtgaacgggcacaagttttcggtgagcggtgagggtgaaggtgacgccacctacggcaagctgacgttgaagttcatatgtacgacgggtaagttgccggtgccgtggccgacgctggtcaccactctgacctacggggtccagtgcttctctagatatccggaccatatgaagcagcatgacttctttaagagtgctatgcctgaaggttatgtccaggagcgtaccatcttctttaaagacgatggtaactacaagacgagggccgaggtgaagttcgagggcgacaccttggtcaatcgtattgagttgaagggcatcgactttaaagaagatggtaacattcttggacataagcttgagtataactataacagtcataatgtttacatcatggcggataagcagaagaacggcatcaaggtaaactttaagatccgtcacaacattgaagacggcagcgtgcagttggcggaccattaccagcagaacacgcccatcggagacggtcccgttctgttgccggacaaccactacctgagtacgcaatcagccctgtcaaaggatcctaacgaaaagagggaccacatggtccttcttgagttcgtcaccgccgccgggatcacgctgggcatggatgagctttacaagcgcagccgtgacatcagccatggcttcccgccggcggtggccgcgcaggacgacgggaccctgcccatgagctgcgctcaggagtccggcatggacaggcatcccgccgcctgtgcgtctgcgcgtatcaacgtgtag

SEQ ID NO: 1046 - DNA, 855 bp, Artificial Sequence
  Modified Open Reading Frame
atggtatcaaaaggcgaggagctcttcacaggcgtggtgcctatcctggtggagctggacggcgacgtgaacggccacaagttcagcgtgtccggagagggcgaaggggatgccacctatggcaagctgaccttgaagttcatctgcaccaccgggaaactcccggtgccctggcccaccctcgtgacgaccctgacctacggggtccagtgcttcagccggtacccggaccacatgaagcagcacgacttcttcaagtccgccatgccagagggctacgtccaggagaggaccatcttctttaaggacgacggcaactataagactagggccgaagtgaagttcgagggtgacaccctcgtgaacaggatcgagctgaagggcatcgacttcaaagaagatggtaacatcctgggacacaagctggagtacaactacaacagccacaacgtgtacatcatggcggacaagcagaagaacgggatcaaggtgaactttaagatcaggcacaacatagaggacggcagcgtccagctcgccgaccactaccagcagaacacaccgatcggcgacggcccggtgctgctgcccgacaaccactacctgagcactcagagcgccctctccaaggaccctaacgaaaagagggatcacatggtcctcctcgagttcgttaccgccgccggcatcaccctgggcatggacgagctctacaaaaggtcccgcgacatcagccacggctttcctccagccgtggcggcgcaggacgacgggaccttgccgatgagctgcgcccaagagtccggcatggataggcacccagccgcctgtgcgagcgccagaataaacgtatga

SEQ ID NO: 1047 - DNA, 855 bp, Artificial Sequence
  Modified Open Reading Frame
atggtatcaaaaggcgaggagctgttcacaggcgtggtgcctatcctggtggagctggacggcgacgtgaacggccacaagttcagcgtgtccggagagggcgaaggggatgccacctatggcaagctgaccttgaagttcatctgcaccaccgggaaactcccggtgccctggcccaccctcgtgacgaccctgacctacggggtccagtgcttcagccggtacccggaccacatgaagcagcacgacttcttcaagtccgccatgccagagggctacgtccaggaaagaaccatcttctttaaggacgacggcaactataagactagagccgaagtgaagttcgagggtgacaccctcgtgaacaggatcgagctgaagggcatcgacttcaaagaagatggtaatatcctgggccacaaactggagtacaactacaacagccacaacgtgtacatcatggcggacaagcagaagaacgggatcaaggtgaactttaagatcaggcacaacatagaggacggcagcgtccagctcgccgaccactaccagcagaacacaccgatcggcgacggcccggtgctgctgcccgacaaccactacctgagcactcagagcgccctctccaaggaccctaacgaaaagagggatcacatggtcctcctcgagttcgttaccgccgccggcatcaccctgggcatggacgagctctacaaaaggtcccgcgacatcagccacggctttcctccagccgtggcggcgcaggacgacgggaccttgccgatgagctgcgcccaagagtccggcatggataggcacccagccgcctgtgccagcgccagaataaacgtataa

SEQ ID NO: 1048 - DNA, 855 bp, Artificial Sequence
  Modified Open Reading Frame
atggtttctaagggggaggagctctttactggggtagtgcctatcctggtggagctggacggggatgtcaatggacataagttctccgtcagcggagaaggggagggcgacgctacctatggcaaattgacgctcaagttcatttgcacaacaggtaagttgcccgtcccgtggccaactttggtcacgaccctcacctatggcgtacagtgtttctctcgataccctgaccatatgaagcagcacgacttctttaaatctgccatgcccgaggggtatgtgcaggagaggaccatcttcttcaaagatgatggtaattacaagactcgtgctgaggtcaagttcgagggagacacgctggtgaatcggatcgagttgaagggaatcgacttcaaggaagatggcaatatactcgggcacaagctcgagtataactataacagccataatgtgtacattatggctgataagcagaagaatggcatcaaggtgaattttaagattcgccacaatattgaagacggttccgttcaactcgccgatcattaccagcaaaatacgcctataggtgatggccccgtcctgctccccgataaccactacctcagtactcagagcgctctgagtaaagatcccaatgaaaagagggatcacatggtgctcctcgagttcgtcactgccgcagggattaccctgggcatggacgaactctacaagcgatctcgagacatctcgcacgggttccctcccgctgtcgctgcgcaagacgatggcacgttgccaatgtcttgcgcacaagagagcgggatggaccggcacccggcagcctgtgcgagtgctcggatcaacgtgtag

SEQ ID NO: 1049 - DNA, 855 bp, Artificial Sequence
  Modified Open Reading Frame
atggtgtccaagggcgaggagctgttcaccggcgtggtgcctatcctggtggagctggacggcgacgtgaacggccacaagtttagcgtgtccggcgagggcgaaggcgacgccacctacggcaagctgaccctgaagttcatctgtaccaccggcaaactgcccgtgccctggcccaccctcgtgaccaccctgacctacggagtccagtgcttcagcagataccccgaccacatgaagcagcacgacttcttcaagtccgccatgcccgagggctacgtgcaggaaagaaccatcttctttaaggacgacggaaactataagaccagagccgaggtgaagttcgagggagacaccctggtgaacagaatcgagctgaagggcatcgacttcaaagaggacggcaacatcctgggccacaaactggagtacaactacaacagccacaacgtgtacatcatggccgacaaacagaagaacgggatcaaggtgaactttaagatcagacacaacatcgaagacggcagcgtgcagctcgccgaccactaccagcagaacacacccatcggcgacggacccgtgctgctgcccgacaaccattacctgagcacccagagcgccctgtccaaggaccctaacgagaagagagatcacatggtgctgctcgagttcgtgaccgccgccggcatcaccctgggcatggacgagctgtacaagagatcccgcgacatcagccacggctttcctcccgccgtggccgcccaagacgacgggaccctgcccatgagctgcgcccaggagtccggcatggacagacaccccgccgcctgtgccagcgccaggatcaacgtgtaa

SEQ ID NO: 1050 - DNA, 855 bp, Artificial Sequence
  Modified Open Reading Frame
atggtttctaagggtgaagagctctttactggggtagtgcctatcctggtggagctggacggggatgtcaatggacataagttctccgtcagcggagaaggggagggcgacgctacctatggcaaattgacgctcaagttcatttgcacaacaggtaagttgcccgtcccgtggccaactttggtcacgaccctcacctatggcgtacagtgtttctctcgataccctgaccatatgaagcagcacgacttctttaaatctgccatgcccgaggggtatgtgcaggagaggaccatcttcttcaaagatgatggtaattacaagactcgtgctgaggtcaagttcgagggagacacgctggtgaatcggatcgagttgaagggaatcgacttcaaggaagatggcaatatactcgggcacaagctcgagtataactataacagccataatgtgtacattatggctgataagcagaagaatggcatcaaggtgaattttaagattcgccacaatattgaagacggttccgttcaactcgccgatcattaccagcaaaatacgcctataggtgatggccccgtcctgctccccgataaccactacctcagtactcagagcgctctgagtaaagatcccaatgaaaagagggatcacatggtgctccttgaatttgtcactgccgcagggattaccctgggcatggacgagctctataagcgatctcgagacatctcgcacgggttccctcccgctgtcgctgcgcaagacgatggcacgttgccaatgtcttgcgcacaagagagcgggatggaccggcacccggcagcctgtgcgagtgctcggatcaacgtgtag

SEQ ID NO: 1051 - DNA, 855 bp, Artificial Sequence
  Modified Open Reading Frame
atggtgtccaagggggaagaactgttcacaggggtggtgcccatccttgtggagctggacggtgacgtgaacggtcacaagttcagcgtgagcggcgagggtgaaggcgatgccacctacggtaagctgaccttgaagttcatctgcacgaccggcaaattgcccgtgccgtggcccacgttggttaccactcttacctatggagtccaatgcttcagtcgatatcccgaccacatgaagcagcacgacttctttaagtcggccatgccggagggatacgtccaggaaagaacgatttttttcaaggacgacggcaactataagactagggccgaggttaagttcgagggagataccttggttaaccgaatcgagctgaagggcatagacttcaaggaagatggtaacatactgggccacaagctggagtataattacaacagccataacgtgtatatcatggccgataagcaaaagaacggcattaaggtgaacttcaagatcagacataatatcgaggatggcagcgttcaactcgccgatcactaccagcagaatacgcccatcggcgatgggccagttcttctcccggacaaccattacctgagcacccagtccgcgctgtccaaggaccctaacgaaaagcgagatcacatggtgcttctcgagttcgttacggccgccggaattaccctgggcatggatgagctctataagcggtcccgcgacatcagccacggctttccgccagccgtggctgctcaggacgacgggaccctgcctatgagctgtgcccaggagtccggcatggacaggcatcccgcggcctgtgccagtgctcgcattaacgtgtga

SEQ ID NO: 1052 - DNA, 855 bp, Artificial Sequence
  Modified Open Reading Frame
atggtgtcaaagggagaagagcttttcacaggggtggttccgatactggtagagttggacggcgacgtgaacgggcacaagttttctgtgagtggtgagggtgaaggtgacgccacctacggcaagctgacgttgaagttcatatgtacgacgggtaagttgccggtgccatggccgacgctggtcaccactctgacctatggggtccagtgcttctctagatatccggaccatatgaagcagcatgacttctttaagagtgctatgcctgaaggttatgtccaggagcgtaccatcttctttaaagacgatggtaactacaagacgagggccgaggtgaagttcgagggcgacaccttggtcaatcgtattgagttgaagggcatcgactttaaagaagatggtaacattcttggacataagcttgagtataactataacagtcataatgtttacatcatggcggataagcagaagaatggcatcaaggtaaactttaagatccgtcacaacattgaagacggcagtgtgcagttggcggaccattaccagcagaacacacccataggagacggtcccgttctgttgccggacaaccactacctgagtacgcaatcagccctgtcaaaagatccgaacgaaaagagggaccacatggtccttcttgagtttgtcaccgccgccgggatcacgctgggcatggatgagctttacaagcgcagccgtgacatcagccatggcttcccgccggcggtggccgcgcaggacgacgggaccctgcccatgagctgcgctcaggagtccggcatggacaggcatcccgccgcctgtgcgtctgcgcgtatcaacgtgtag

SEQ ID NO: 1053 - DNA, 855 bp, Artificial Sequence
  Modified Open Reading Frame
atggtgtccaagggcgaggagctgttcaccggcgtggtgcctatcctggtggagctggacggcgacgtgaacggccacaagtttagcgtgtccggcgagggcgaaggcgacgccacctacggcaagctgaccctgaagttcatctgcaccaccggcaaactgcccgtgccctggcccaccctcgtgaccaccctgacctacggagtccagtgcttcagtagataccccgatcacatgaagcagcacgacttcttcaagagtgccatgcccgagggctacgtgcaggaaagaaccatcttctttaaggacgacggaaactataagaccagagccgaggtgaagttcgagggagacaccctggtgaacagaatcgagctgaagggcatcgacttcaaagaggacggcaacatcctgggccacaaactggagtacaattataacagccataatgtgtacatcatggccgacaagcagaagaacggcattaaggtgaactttaagatcagacacaacatcgaagacggcagcgtgcagctcgccgatcactaccagcagaacacgccgatcggcgacggacccgtgctgctgcccgacaaccattacctgagcacccagagcgccctgtccaaggaccctaacgagaagagagatcacatggtgctgctcgagttcgtgaccgccgccggcatcacgctgggcatggacgagctgtacaagcgttcccgcgacatcagccacggctttcctcccgccgtggccgcccaagacgacgggaccctgcccatgagctgcgcccaggagtccggcatggacagacaccccgccgcctgtgccagcgccaggatcaacgtgtaa

SEQ ID NO: 1054 - DNA, 855 bp, Artificial Sequence
  Modified Open Reading Frame
atggtgtcaaagggagaggagcttttcacaggggtggttccgatactggtagagttggacggcgacgtgaacgggcacaagttttctgtgagtggtgagggtgaaggtgacgccacctacggcaagctgacgttgaagttcatatgtacgacgggtaagttgccggtgccatggccgacgctggtcaccactctgacctatggggtccagtgcttctctagatatccggaccatatgaagcagcatgacttctttaagagtgctatgcctgaaggttatgtccaggagcgtaccatcttctttaaagacgatggtaactacaagacgagggccgaggtgaagttcgagggcgacaccttggtcaatcgtattgagttgaagggcatcgactttaaagaagatggtaacattcttggacataagcttgagtataactataacagtcataatgtttacatcatggcggataagcagaagaatggcatcaaggtaaactttaagatccgtcacaacattgaagacggcagtgtgcagttggcggaccattaccagcagaacacacccataggagacggtcccgttctgttgccggacaaccactacctgagtacgcaatcagccctgtcaaaagatccgaacgaaaagagggaccacatggtccttcttgagtttgtcaccgccgccgggatcacgctgggcatggatgagctttacaagcgcagccgtgacatcagccatggcttcccgccggcggtggccgcgcaggacgacgggaccctgcccatgagctgcgctcaggagtccggcatggacaggcatcccgccgcctgtgcgtctgcgcgtatcaacgtgtag

SEQ ID NO: 1055 - DNA, 855 bp, Artificial Sequence
  Modified Open Reading Frame
atggtaagcaaaggagaggaactattcaccggcgtggtgccgattctggtagaactggacggggacgtcaacgggcacaagttctctgtgtctggtgaaggcgagggcgacgcgacctatggtaagctgactctgaagttcatctgtacgaccggaaagctgcctgtcccctggcctacacttgtgacgacgttgacgtacggagttcagtgcttctcccggtacccggaccacatgaagcagcatgacttcttcaagtctgcgatgcctgagggctacgtgcaggagcgcacgatcttctttaaggacgacggtaactataagacccgtgctgaagtgaagttcgagggtgacacactagtcaacaggatcgagctgaagggcattgacttcaaggaggacgggaatatactgggacacaaactcgagtacaactacaattctcacaacgtgtatatcatggcggacaagcagaagaacggcataaaggtgaacttcaagattcggcataatatcgaagatgggtccgtgcagctcgccgatcactaccagcagaacacgccgatcggtgacggccccgtccttctgccggacaatcattatctctccacgcagtcagcgttatcgaaggacccaaatgagaagagagatcatatggtgctccttgagttcgtgacagcggccggcatcacgctgggcatggacgagctgtacaagagatcccgcgacatcagccacggctttcctcccgctgtggccgcacaggacgatggcaccctgccaatgtcctgtgcccaggagagcgggatggacagacacccagccgcatgtgcgagcgcgaggatcaacgtatga

SEQ ID NO: 1056 - DNA, 855 bp, Artificial Sequence
  Modified Open Reading Frame
atggtgtccaagggcgaggagctcttcactggcgtcgtccccatcctcgtcgaacttgacggcgacgtcaacggacacaagttttctgtgtccggcgagggtgagggcgacgccacgtatggaaagcttacccttaagttcatctgtacgactggaaagctccccgtcccttggcccaccctcgtcaccaccctgacgtatggcgtacagtgcttcagtcggtaccccgaccatatgaagcagcacgacttcttcaagtcggcgatgccggaggggtatgtccaggagcgcacgatcttctttaaggacgacggcaactataagactagggccgaggtcaagttcgaaggggacacccttgtgaaccgcatcgagctgaagggtatcgacttcaaggaggacgggaacatcctcggtcataagttggagtataattataactcccataacgtctatattatggcggataagcagaagaatggcatcaaggtcaacttcaagatccgccataatatagaggatgggagtgttcagctggcagatcactaccagcagaacactccgatcggggatggtcccgtcctccttcccgataaccactacctctcgacgcagagcgctctctcgaaggaccccaacgagaagcgcgaccacatggtccttctagagttcgtcactgccgccggcatcaccctcggcatggacgagctctacaagcgctcccgcgacatctcgcacggcttcccccctgccgtcgccgcccaggacgacggcaccctccccatgtcgtgcgcgcaggagagcggcatggaccggcaccccgccgcgtgcgcctctgcacgcatcaacgtgtag

SEQ ID NO: 1057 - DNA, 855 bp, Artificial Sequence
  Modified Open Reading Frame
atggtaagcaaaggagaggagctattcaccggcgtggtgccgattctggtagaactggacggggacgtcaacgggcacaagttctctgtgtctggtgaaggcgagggcgacgcgacctatggtaagctgactctgaagttcatctgtacgaccggaaagctgcctgtcccctggcctacacttgtgacgacgttgacgtacggagttcagtgcttctcccggtacccggaccacatgaagcagcatgacttcttcaagtctgcgatgcctgagggctacgtgcaggagcgcacgatcttctttaaggacgacggtaactataagacccgtgctgaagtgaagttcgagggtgacacactagtcaacaggatcgagctgaagggcattgacttcaaggaggacgggaatatactgggacacaaactcgagtacaactacaattctcacaacgtgtatatcatggcggacaagcagaagaacggcataaaggtgaacttcaagattcggcataatatcgaagatgggtccgtgcagctcgccgatcactaccagcagaacacgccgatcggtgacggccccgtccttctgccggacaatcattatctctccacgcagtcagcgttatcgaaggacccaaatgagaagagagatcatatggtgctccttgagttcgtgacagcggccggcatcacgctgggcatggacgagctgtacaagagatcccgcgacatcagccacggctttcctcccgctgtggccgcacaggacgatggcaccctgccaatgtcctgtgcccaggagagcgggatggacagacacccagccgcatgtgcgagcgcgaggatcaacgtatga

SEQ ID NO: 1058 - DNA, 855 bp, Artificial Sequence
  Modified Open Reading Frame
atggtatcaaaaggcgaggaactgttcacaggtgtcgtccccatattggtggagctggacggcgatgtgaatggacacaagttttctgtgtcgggggagggcgagggcgacgcgacgtacgggaagcttaccctgaagttcatctgcactacgggtaagcttcctgtgccctggcccactttggtaaccacactgacgtacggcgtgcagtgcttctcgcggtatcctgatcacatgaaacagcacgactttttcaaatcggcgatgcctgagggttatgtccaggaacgtaccatcttctttaaggacgatggcaattacaagacccgggccgaggtgaagttcgagggcgacaccttggtgaaccggatcgagctgaagggcatcgactttaaggaggatggtaacatcctgggccacaagttggaatacaactataactctcacaatgtctacatcatggcagacaagcagaagaatggtatcaaagtgaacttcaaaatccggcacaacattgaagacggttccgttcagctcgccgaccactaccagcagaacacgccgattggggacggcccggtactactgccggataatcattatttgtcgactcagtcggcactgtccaaggatcccaacgagaagcgtgatcacatggttctgttggagtttgtgacggccgccggcatcacgctgggcatggacgagctgtacaaacgatcccgggacatcagccacggctttcctcccgccgtggctgcccaagacgacgggaccctacccatgagctgcgcacaggagtccggcatggacagacaccccgccgcctgtgccagcgcaaggataaatgtatag

SEQ ID NO: 1059 - DNA, 855 bp, Artificial Sequence
  Modified Open Reading Frame
atggtttcaaaaggggaagaactgtttactggggtcgttccaattctggttgagttggatggcgatgtgaacggtcacaagttctcggtaagcggagagggtgaaggcgatgccacgtatggcaagcttaccctcaaattcatctgcactactggcaaactacccgttccctggcctacactggtcactaccttgacctatggggttcagtgtttcagtcgttatccggatcacatgaagcagcacgacttctttaagtcggctatgcccgagggctatgtacaggaacggacgattttcttcaaggatgacggaaattacaaaactcgcgctgaagtcaaatttgagggcgacacgctggtaaataggattgagttgaagggcatagacttcaaagaggatggcaatattttgggccacaagttggagtataactacaatagtcataatgtatacataatggccgataagcagaaaaacggcattaaggtgaacttcaaaatccgtcacaatatcgaagatggatctgtgcagctcgcggatcattatcagcagaatacgccaataggggatgggccagtacttttgcctgacaaccactatctttcgacccagtctgccctttcaaaggaccccaatgaaaagagggatcatatggtgctattggagttcgtcactgcagcaggtatcactctaggcatggatgagctctataagcgctcaagggatatctctcatgggttccccccggccgttgcagcacaagatgacgggacgctgccaatgtcttgcgcgcaagagtctggaatggatcgccaccccgcggcttgcgcctctgcacggatcaacgtataa

SEQ ID NO: 1060 - DNA, 855 bp, Artificial Sequence
  Modified Open Reading Frame
atggtatcaaaaggcgaggaactgttcacaggtgtcgtccccatattggtggagctggacggcgatgtgaatggacacaagttttctgtgtcgggggagggcgagggcgacgcgacgtacgggaagcttaccctgaagttcatctgcactacgggtaagcttcctgtgccctggcccactttggtaaccacactgacgtacggcgtgcagtgcttctcgcggtatcctgatcacatgaaacagcacgactttttcaaatcggcgatgcctgagggttatgtccaggaacgtaccatcttctttaaggacgatggcaattacaagacccgggccgaggtgaagttcgagggcgacaccttggtgaaccggatcgagctgaagggcatcgactttaaggaggatggtaacatcctgggccacaagttggaatacaactataactctcacaatgtctacatcatggcagacaagcagaagaatggtatcaaagtaaacttcaaaatccggcacaacattgaagacggttccgttcagctcgccgaccactaccagcagaacacgccgattggggacggcccggtactactgccggataatcattatttgtcgactcagtcggcactgtccaaggatcccaacgagaagcgtgatcacatggttctgttggagtttgtgacggccgccggcatcacgctgggcatggacgagctgtacaaacgatcccgggacatcagccacggctttcctcccgccgtggctgcccaagacgacgggaccctacccatgagctgcgcacaggagtccggcatggacagacaccccgccgcctgtgccagcgcaaggataaatgtatag

SEQ ID NO: 1061 - DNA, 855 bp, Artificial Sequence
  Modified Open Reading Frame
atggtttcgaagggtgaagaactgtttacaggtgtggtgcctatcttagtcgaactagatggcgacgttaacgggcataaattctcggtatccggtgagggcgaaggggacgctacctacggaaaacttacgcttaagtttatctgtactaccggtaaactccctgtcccctggcccacattggtaaccacgctgacatacggtgttcaatgtttttcgcgataccctgatcacatgaagcagcatgatttctttaagtcggctatgcctgaaggatatgtccaggagaggacaatctttttcaaagacgacgggaactataaaactcgagcagaagtgaagtttgaaggagatacgttagtgaacaggatcgagttaaaaggtattgatttcaaggaggacggaaacatcttaggtcacaaattagagtacaactataattcccacaatgtgtatatcatggcggataagcagaagaatgggattaaagtgaattttaagatacgccacaacattgaggacggatccgttcagcttgcagatcattaccagcaaaatacgcctattggagacgggccagtgttacttcctgataatcactacctgtctacgcagagtgcactgtcgaaagatcccaatgagaagagagaccacatggtcctactcgaattcgtaactgcagctggtatcactctgggtatggacgaattatataaacggagtagagacatctcacacggttttcccccagcggttgctgctcaggacgatggaacgcttccaatgtcctgtgcacaggagagtgggatggataggcatcctgcggcctgtgcgtcggcccgtattaacgtttaa

SEQ ID NO: 1062 - DNA, 855 bp, Artificial Sequence
  Modified Open Reading Frame
atggtgagcaaaggggaggagctattcaccggagtggttccgatattagtggaacttgacggagatgtaaatgggcataagttctcagtttcaggtgagggcgaaggtgatgccacttacggcaaacttacgttgaaatttatatgtacaacagggaaactaccagtgccgtggccaacccttgtcactacgctgacttacggagtccagtgtttcagcaggtatccggaccatatgaagcaacatgactttttcaagtcagcaatgccagagggttacgttcaggagcgcacaatattctttaaggatgatggtaattataaaactcgcgctgaggtgaagtttgagggagatacattggtgaatcggattgaattaaagggtatagactttaaggaggatggcaatatattgggtcataagcttgagtataactataatagtcacaacgtttatatcatggctgacaaacagaagaatggtataaaggtaaactttaagatccgccataacatcgaggatgggagtgttcagttggccgatcattaccagcagaacactccaattggtgatggaccagtgctactacctgacaatcattatctaagcacgcagtctgccttatccaaagacccgaacgagaagagggatcatatggtactgttggaattcgttactgcggcaggcatcactttgggcatggacgaattatataagcggtctagggatatcagccacggatttccaccggccgttgcagcccaggatgatgggactctgcccatgagctgtgcccaggaatcagggatggatcgccatcccgcagcctgtgcaagtgccaggattaatgtctaa

SEQ ID NO: 1063 - DNA, 855 bp, Artificial Sequence
  Modified Open Reading Frame
atggtatctaaaggagaggaactattcactggagtagttcctatccttgtggagttggacggcgacgtgaacggccacaagttctccgtgtcgggtgagggcgaaggggacgccacctacggcaagttgacgttgaagtttatttgcacaacgggcaaattgccggtaccgtggccgaccttggtgacgaccttaacttacggagttcagtgcttcagtaggtacccggaccacatgaagcaacatgatttctttaagtccgccatgcctgaaggatacgtacaagaacgtacgatattcttcaaggatgacggtaactataagacccgagctgaggtgaagttcgagggcgatacgctcgtgaaccgcatcgagctcaagggcattgacttcaaggaggacgggaacatactggggcacaagctggagtataattacaacagccacaacgtttatatcatggctgacaaacagaagaatggtataaaagttaacttcaagataaggcacaacatcgaggacggctcggtacagttggcggaccactatcagcagaacaccccgatcggagatgggcctgttctgttgccggacaaccattatctatcaacacagagtgccctttcgaaggatcccaacgagaagagggatcacatggtgttgttagagttcgtgacagcggccgggattacgctcggaatggatgagttatataagcgttcgcgcgatataagtcatggctttccgccggctgttgctgcacaggacgatggcactttgccaatgtcctgtgcgcaagagtccggcatggaccggcacccggccgcatgcgcgagcgctagaattaatgtataa

SEQ ID NO: 1064 - DNA, 855 bp, Artificial Sequence
  Modified Open Reading Frame
atggtatcgaagggagaggagctgtttactggcgtggtccccattctagtcgagctggacggtgatgtgaacggtcacaagttttcggtgtcaggcgagggagagggggacgccacgtacgggaagttaacacttaagtttatctgcacgaccggaaaacttcctgtaccatggccaaccctagtaacgacgttgacttatggtgttcagtgcttctcgcggtatcctgaccatatgaaacaacacgacttctttaagagtgcgatgccggagggctatgtgcaggagcgcaccatctttttcaaggacgacgggaactataagacaagagctgaggtcaaatttgaaggagacactctagtaaatcgcatagaactcaagggtatagactttaaagaagacggtaatatcctaggacataaactggaatacaattacaactcgcacaacgtgtacatcatggcagacaagcagaagaacggcatcaaggtcaatttcaagattaggcataacatagaagacggaagtgtgcagcttgcagaccattaccagcagaacacccctattggagatgggcctgtattattacccgacaatcattacctatcgacgcagagcgcgctgtctaaagacccaaacgagaaacgtgatcatatggtactcctggaatttgttacggctgcgggtataacactgggaatggatgagctttataaaaggtcgagagacatctcgcatggatttcccccagctgtagccgcacaggatgacgggactcttcccatgagctgcgcgcaggaatccggtatggatcgtcatccagctgcgtgcgcgtcagctcgtataaatgtgtaa

SEQ ID NO: 1065 - DNA, 855 bp, Artificial Sequence
  Modified Open Reading Frame
atggtatcaaaaggagaggaactatttaccggtgtcgtccccatattggtggagctggacggcgatgtgaatggacacaagttttctgtgtcgggggagggcgagggcgacgcgacgtacgggaagcttaccctgaagttcatctgcactacgggtaagcttcctgtgccctggcccactttggtaaccacactgacgtacggcgtgcagtgcttctcgcggtatcctgatcacatgaaacagcacgactttttcaaatcggcgatgcctgagggttatgtccaggaacgtaccatcttctttaaggacgatggcaattacaagacccgggccgaggtgaagttcgagggcgacaccttggtgaaccggatcgagctgaagggcatcgactttaaggaggatggtaacatcctgggccacaagttggaatacaactataactctcacaatgtctacatcatggcagacaagcagaagaatggtatcaaagtaaacttcaaaatccggcacaacattgaagacggttccgttcagctcgccgaccactaccagcagaacacgccgattggggacggcccggtactactgccggataatcattatttgtcgactcagtcggcactgtccaaggatcccaacgagaagcgtgatcacatggttctgttggagtttgtgacggccgccggcatcacgctgggcatggacgagctgtacaaacgatcccgggacatcagccacggctttcctcccgccgtggctgcccaagacgacgggaccctacccatgagctgcgcacaggagtccggcatggacagacaccccgccgcctgtgccagcgcaaggataaatgtgtaa

SEQ ID NO: 1066 - DNA, 855 bp, Artificial Sequence
  Modified Open Reading Frame
atggtgtcaaaaggcgaagaactatttaccggtgtcgtccccatattggtggagctggacggcgatgtgaatggacacaagttttctgtgtcgggggagggcgagggcgacgcgacgtacgggaagcttaccctgaagttcatctgcactacgggtaagcttcctgtgccctggcccactttggtaaccacactgacgtacggcgtgcagtgcttctcgcggtatcctgatcacatgaaacagcacgactttttcaaatcggcgatgcctgagggttatgtccaggaacgtaccatcttctttaaggacgatggcaattacaagacccgggccgaggtgaagttcgagggcgacaccttggtgaaccggatcgagctgaagggcatcgactttaaggaggatggtaacatcctgggccacaagttggaatacaactataactctcacaatgtctacatcatggcagacaagcagaagaatggtatcaaagtaaacttcaaaatccggcacaacattgaagacggttccgttcagctcgccgaccactaccagcagaacacgccgattggggacggcccggtactgttaccggataatcattacctgtcgactcagtcggcactgtccaaggatcccaacgagaagcgtgatcacatggttctgttggagtttgtgacggccgccggcatcacgctgggcatggacgagctgtacaaacgatcccgggacatcagccacggctttcctcccgccgtggctgcgcaagacgacgggaccctgcccatgagctgcgcacaggagtccggcatggacagacaccccgccgcctgtgccagcgcaagaatcaacgtctaa

SEQ ID NO: 1067 - DNA, 855 bp, Artificial Sequence
  Modified Open Reading Frame
atggtgtccaagggcgaggagctgttcaccggtgtcgtccccatattggtggagctggacggcgatgtgaatggacacaagttttctgtgtcgggggagggcgagggcgacgcgacgtacgggaagcttaccctgaagttcatctgcactacgggtaagcttcctgtgccctggcccactttggtaaccacactgacgtacggcgtgcagtgcttctcgcggtatcctgatcacatgaaacagcacgactttttcaaatcggcgatgcctgagggttatgtccaggaacgtaccatcttctttaaggacgatggcaattacaagacccgggccgaggtgaagttcgagggcgacaccttggtgaaccggatcgagctgaagggcatcgactttaaggaggatggtaacatcctgggccacaagttggaatacaactataactctcacaatgtctacatcatggcagacaagcagaagaatggtatcaaagtaaacttcaaaatccggcacaacattgaagacggttccgttcagctcgccgaccactaccagcagaacacgccgattggggacggcccggtgctcctgcccgacaaccattacctgtcgactcagtcggcactgtccaaggatcccaacgagaagcgtgatcacatggttctgttggagtttgtgacggccgccggcatcacgctgggcatggacgagctgtacaaacgatcccgggacatcagccacggctttcctcccgccgtggctgcccaggacgacgggaccctgcccatgagctgcgcacaggagtccggcatggacagacaccccgccgcctgtgccagcgccaggatcaacgtctaa

SEQ ID NO: 1068 - DNA, 855 bp, Artificial Sequence
  Modified Open Reading Frame
atggtatctaagggcgaggagctgtttacgggcgtcgtccccatcctcgtcgagctagacggagacgtgaacggtcacaagttctccgtctccggtgagggtgagggcgacgccacgtacggcaagctcacattgaagttcatatgtacaacgggcaagctgcccgtgccatggcccaccctcgtaactaccctcacgtacggcgtccagtgtttctcgcgctacccggaccatatgaagcagcacgacttcttcaagtccgcgatgcccgagggctacgtccaggagcgcaccatcttcttcaaagacgatggaaactacaagacccgtgcggaggtgaagttcgagggcgacacccttgtcaaccgaatcgagctgaaaggcatcgacttcaaggaggatggcaacatcctgggccataagctggagtacaactacaactcccacaacgtctatattatggcggataagcagaagaatggcattaaggtcaacttcaagatccgccataatatagaggacgggtccgtccagctggcggaccactaccagcagaacacccccatcggcgacggacccgtcctcctgccggacaatcactacttgtccacgcagtccgcgctctcaaaggaccccaatgagaagcgcgatcacatggtcctgctggagttcgtcactgccgcggggataaccctcggcatggacgaactctacaagcgctcgcgcgacatctcccacgggtttccacccgcagtcgcggcgcaggacgatgggacactccccatgtcctgcgcgcaggagtccggcatggatagacatcctgccgcttgcgcgagcgccaggatcaacgtgtga

SEQ ID NO: 1069 - DNA, 855 bp, Artificial Sequence
  Modified Open Reading Frame
atggtaagcaaaggagaggagctattcaccggcgtggtgccgattctggtagaactggacggggacgtcaacgggcacaagttctctgtgtctggtgaaggcgagggcgacgcgacctatggtaagctgactctgaagttcatctgtacgaccggaaagctgcctgtcccctggcctacacttgtgacgacgttgacgtacggagttcagtgcttctcccggtacccggaccacatgaagcagcatgacttcttcaagtctgcgatgcctgagggctacgtgcaggagcgcacgatcttctttaaggacgacggtaactataagacccgtgctgaagtgaagttcgagggtgacacactagtcaacaggatcgagctgaagggcattgacttcaaggaggacgggaatatactgggacacaaactcgagtacaactacaattctcacaacgtgtatatcatggcggacaagcagaagaacggcataaaggtgaacttcaagattcggcataatatcgaagatgggtccgtgcagctcgccgatcactaccagcagaacacgccgatcggtgacggccccgtccttctgccggacaatcattatctctccacgcagtcagcgttatcgaaggacccaaatgagaagagagatcatatggtgctccttgagttcgtgacagcggccggcatcacgctgggcatggacgagctgtataagagatcccgcgacatcagccacggctttcctcccgctgtggccgcacaggacgatggcaccctgccaatgtcctgtgcccaggagagcgggatggacagacacccagccgcatgtgcgagcgcgaggatcaacgtatga

SEQ ID NO: 1070 - DNA, 855 bp, Artificial Sequence
  Modified Open Reading Frame
atggtatctaagggcgaggagctgtttacgggcgtcgtccccatcctcgtcgagctagatggagacgtgaacggtcataagttctccgtctccggtgagggtgagggcgacgccacgtacggcaagctcacattgaagttcatatgtacaacgggcaagctgcccgtgccatggcccaccctcgtaactaccctcacgtacggcgtccagtgtttctcgcgctacccggaccatatgaagcagcacgacttcttcaagtccgcgatgcccgagggctacgtccaggagcgcaccatcttcttcaaagacgatggaaactacaagacccgtgcggaggtgaagttcgagggcgacacccttgtcaaccgaatcgagctgaaaggcatcgacttcaaggaggatggcaacatcctgggccataagctggagtacaactacaactcccacaacgtctatattatggcggataagcagaagaatggcattaaggtcaacttcaagatccgccataatatagaggacgggtccgtccagctggcggaccactaccagcagaacacccccatcggcgacggacctgtcctcctgccggacaatcactacttgtccacgcagtccgcgctctcaaaggaccccaatgagaagcgcgatcacatggtcctgctggagttcgtcactgctgcggggataactctcggcatggatgaactctacaagcgctcgcgcgacatctcccacgggtttcctcccgcagtcgcggcgcaggacgatgggacactccccatgtcctgcgcgcaggagtccggcatggatagacatcctgccgcttgcgcgagcgccaggatcaacgtgtga

SEQ ID NO: 1071 - DNA, 855 bp, Artificial Sequence
  Modified Open Reading Frame
atggtgtcgaaaggcgaggagctgtttacgggcgtcgtccccatcctcgtcgagctagatggagacgtgaacggtcataagttctccgtctccggtgagggtgagggcgacgccacgtacggcaagctcaccctgaagttcatatgtacaacgggcaagctgcccgtgccatggcccaccctcgtaactaccctcacgtacggcgtccagtgtttctcgcgctacccggaccatatgaagcagcacgacttcttcaagtccgcgatgcccgagggctacgtccaggagcgcaccatcttcttcaaagacgatggaaactacaagacccgtgcggaggtgaagttcgagggcgacacccttgtcaaccgaatcgagctgaaaggcatcgacttcaaggaggatggcaacatcctgggccataagctggagtacaactacaactcccacaacgtctatattatggcggataagcagaagaatggcattaaggtcaacttcaagatccgccataatatagaggacgggtccgtccagctggcggaccactaccagcagaacacccccatcggcgacggacctgtcctcctgccggacaatcactacttgtccacgcagtccgcgctctcaaaggaccccaatgagaagcgcgatcacatggtcctgctggagttcgtcactgctgcggggataactctcggcatggatgaactctacaagcgctcgcgcgacatctcccacgggtttcctcccgcagtcgcggcgcaggacgatgggacactccccatgtcctgcgcgcaggagtccggcatggatagacatcctgccgcttgcgcgagcgccaggatcaacgtgtga

SEQ ID NO: 1072 - DNA, 855 bp, Artificial Sequence
  Modified Open Reading Frame
atggtgtcgaaaggcgaggagctgtttacgggcgtcgtccccatcctcgtcgagctagacggagacgtgaacggtcacaagttctccgtctccggcgagggtgagggcgacgccacgtacggcaagctcaccctgaagttcatatgtacaacgggcaagctgcccgtgccatggcccaccctcgtaactaccctcacgtacggcgtccagtgtttctcgcgctacccggaccatatgaagcagcacgacttcttcaagtccgcgatgcccgagggctacgtccaggagcgcaccatcttcttcaaagacgatggaaactacaagacccgtgcggaggtgaagttcgagggcgacacccttgtcaaccgaatcgagctgaaaggcatcgacttcaaggaggatggcaacatcctgggccataagctggagtacaactacaactcccacaacgtctatattatggcggataagcagaagaatggcattaaggtcaacttcaagatccgccataatatagaggacgggtccgtccagctggcggaccactaccagcagaacacccccatcggcgacggacccgtcctcctgccggacaatcactacttgtccacgcagtccgcgctctcaaaggaccccaatgagaagcgcgatcacatggtcctgctggagttcgtcactgccgcggggataaccctcggcatggacgaactctacaagcgctcgcgcgacatctcccacgggtttcctcccgcagtcgcggcgcaggacgatgggacactccccatgtcctgcgcgcaggagtccggcatggatagacatcctgccgcttgcgcgagcgccaggatcaacgtgtga

SEQ ID NO: 1073 - DNA, 855 bp, Artificial Sequence
  Modified Open Reading Frame
atggtgtctaagggcgaggagctgttcaccggtgtggtgcctatcctggtggagctggacggcgacgtgaacggccacaagttctctgtgtctggcgagggcgagggcgatgccacctacggcaagctgaccctgaagttcatctgcaccaccggcaagctgcccgtgccctggcccaccctggtgaccaccctgacctacggcgtgcagtgcttctctcggtaccccgaccacatgaagcagcacgacttcttcaagtctgccatgcccgagggctacgtgcaggagcggaccatcttcttcaaggacgatggcaattacaagacccgggccgaggtgaagttcgagggcgacaccttggtgaaccggatcgagctgaagggcatcgacttcaaggaggatggcaacatcctgggccacaagctggagtacaactacaactctcacaatgtgtatatcatggccgacaagcagaagaacggcatcaaggtgaacttcaagatccggcacaacatcgaggacggctctgtgcagctggccgaccactaccagcagaacacccccatcggtgacggccccgtgctgctgcccgacaaccactacctgtctacccagtctgccctgtctaaggaccccaacgagaagcgggaccacatggtgctgctggagttcgtcactgccgcgggtatcaccctcggcatggacgagctgtacaagagatcccgcgacatcagccacggctttcctccggccgtggccgcccaagacgacgggaccctgcccatgagctgcgcccaggagtccggcatggacagacaccccgccgcctgtgccagcgccaggatcaacgtgtaa

SEQ ID NO: 1074 - DNA, 855 bp, Artificial Sequence
  Modified Open Reading Frame
atggtgtcgaaaggcgaggagctctttacgggcgtcgtccccatcctcgtcgagctagacggagatgtgaacggtcacaaattctccgtctccggcgagggtgagggcgacgcgacgtacggcaagctcaccctgaagttcatatgtacaacgggcaagctgcccgtgccttggcccaccctcgtaactaccctcacgtacggcgtccagtgtttctcgcgctacccggaccatatgaagcagcacgacttcttcaagtccgcgatgcccgagggctacgtccaggagcgcaccatcttcttcaaagacgatggaaactacaagacccgtgcggaggtgaagttcgagggcgacacccttgtcaaccgaatcgagctgaaaggcatcgacttcaaggaggatggcaacatcctgggccataagctggagtacaactacaactcccacaacgtctatattatggcggataagcagaagaatggcattaaggtcaacttcaagatccgccataatatagaggacgggtccgtccagctggcggaccactaccagcagaacacccccatcggcgacggacccgtcctcctgccggacaatcactacttgtccacgcagtccgcgctctcaaaggaccccaatgagaagcgcgatcacatggtcctgctggagttcgtcactgccgcggggataaccctcggcatggacgaactctacaagcgctcgcgcgacatctcccacgggtttccacccgcagtcgcggcgcaggacgatgggacactccccatgtcctgcgcgcaggagtccggcatggatagacatcctgccgcttgcgcgagcgccaggatcaacgtgtga

SEQ ID NO: 1075 - DNA, 855 bp, Artificial Sequence
  Modified Open Reading Frame
atggtaagtaagggtgaagagctcttcacaggcgtcgtccccatcctcgtcgagttagacggagatgtgaatggtcacaagttctccgtctccggcgagggtgagggcgacgccacgtacggcaagttaactcttaagtttatttgcacgacaggtaaattgcccgtaccctggccgacactggtcaccacacttacgtatggtgtccagtgcttcagtcggtatcccgaccatatgaagcagcacgacttcttcaagtcggccatgcccgagggttatgtccaggagcggaccatctttttcaaagatgacgggaactataagacacgggccgaggttaagttcgagggcgacactctggtgaatcgcatcgaacttaagggtatcgactttaaggaggacgggaacatactggggcacaagctggagtacaactataactcgcataatgtctatatcatggctgataagcagaagaatggcatcaaggtcaacttcaagattagacataatatcgaggatggtagtgtccagctggccgaccattaccagcagaatactccgattggtgatggtccagtattgcttcccgataatcactacctgtcgacccagtcggccctgtctaaggacccgaatgaaaagcgggaccatatggtcctgcttgagttcgttaccgctgctggcataaccctgggcatggacgagttgtacaagaggtcgcgcgacatcagccatggcttccccccggctgttgctgcgcaggacgatgggactcttcccatgtcctgcgcgcaggagtcggggatggatcgccatccggctgcgtgtgcgtcggccaggattaatgtttaa

SEQ ID NO: 1076 - DNA, 855 bp, Artificial Sequence
  Modified Open Reading Frame
atggtaagtaagggtgaagagctctttaccggtgttgtccccatccttgtcgagttagatggagatgtgaatggtcacaagttctccgtctctggcgagggtgagggcgacgccacctacggcaagttaactcttaagtttatttgcacgacaggtaaattaccagtaccttggccgacactggtcactacacttacgtatggtgttcagtgcttcagtcggtatcctgaccatatgaagcagcatgatttcttcaagtcggctatgcctgagggttatgttcaggagcggaccatctttttcaaagatgacggaaactataagacacgagctgaggttaagttcgagggtgacactctggtgaatcgcatcgaacttaagggtatcgactttaaggaggacgggaacatactggggcacaagttggagtacaactataactcacataatgtctatatcatggctgataagcagaagaatggcatcaaggtcaacttcaagattagacataatattgaggatggtagtgtccagctggccgaccattatcagcagaatactccgattggtgatggtccagtattgcttcctgataatcactacctgtcgactcagtcggctctgtctaaggatccgaacgaaaagcgggatcatatggtcctgcttgagttcgttactgctgctggcataactcttggtatggacgagttgtacaagaggtcgcgcgacatcagtcatggcttccctccggctgttgctgcgcaggacgatgggactcttcctatgtcttgtgcacaggagtcggggatggatcgtcatccggctgcatgtgcgtcggccaggattaatgtttaa

SEQ ID NO: 1077 - DNA, 855 bp, Artificial Sequence
  Modified Open Reading Frame
atggtgtcgaaaggcgaggagctgtttacgggcgtcgtccccatcctcgtcgagctagacggagacgtgaacggtcacaagttctccgtctccggcgagggtgagggcgacgccacgtacggcaagctcaccctgaagttcatatgtacaacgggcaagctgcccgtgccatggcccaccctcgtaactaccctcacgtacggcgtccagtgtttctcgcgctacccggaccatatgaagcagcacgacttcttcaagtccgcgatgcccgagggctacgtccaggagcgcaccatcttcttcaaagacgatggaaactacaagacccgtgcggaggtgaagttcgagggcgacacccttgtcaaccgaatcgagctgaaaggcatcgacttcaaggaggatggcaacatcctgggccataagctggagtacaactacaactcccacaacgtctatattatggcggataagcagaagaatggcattaaggtcaacttcaagatccgccataatatagaggacgggtccgtccagctggcggaccactaccagcagaacacccccatcggcgacggacccgtcctcctgccggacaatcactacttgtccacgcagtccgcgctctcaaaggaccccaatgagaagcgcgatcacatggtcctgctggagttcgtcactgccgcggggataaccctcggcatggacgaactctacaagcgctcgcgcgacatctcccacgggtttccacccgcagtcgcggcgcaggacgatgggacactccccatgtcctgcgcgcaggagtccggcatggatagacatcctgccgcttgcgcgagcgccaggatcaacgtgtga

SEQ ID NO: 1078 - DNA, 855 bp, Artificial Sequence
  Modified Open Reading Frame
atggtttccaagggcgaggagctgtttaccggcgtggtgcctatcctcgtggagctggacggcgacgtgaacgggcacaagtttagcgtgtccggagagggcgagggggacgccacctacgggaagctgaccttgaagttcatctgtaccaccggcaaactgcccgtgccctggcctacgttggtcaccaccctgacctacggagtccagtgcttcagtaggtaccccgaccacatgaagcagcacgacttcttcaagtccgccatgcctgagggctatgtccaagaacgtaccatcttctttaaagacgacggcaactataagactagagccgaagtcaagttcgagggggacacccttgtgaacagaatcgagctgaagggcatcgattttaaagaggatggtaacattcttgggcataagctggagtataactacaacagccacaacgtctacatcatggcggacaagcagaagaatggtatcaaggtgaactttaagatcagacacaacatagaggacggcagcgtgcagcttgccgaccactatcagcagaacacgccgatcggcgacggtcccgtgctgctgcccgacaaccattatctgagcactcagagcgccctctccaaggaccctaacgagaagagagaccacatggtcctcctcgagttcgttaccgccgccggcatcaccctgggcatggacgagctttataagcggtcccgcgacatcagccacggctttcctccagccgtggcggcccaggacgatgggaccttgccgatgagctgcgcgcaggagtccggcatggacagacatccggccgcctgcgctagcgctaggatcaacgtgtaa

SEQ ID NO: 1079 - DNA, 855 bp, Artificial Sequence
  Modified Open Reading Frame
atggtgtccaagggtgaggagctgttcacaggggtggtgccaatactggtggagctggacggcgacgtgaacggtcacaagtttagcgtgtccggcgagggcgaaggcgacgcaacctacggcaagctgacactgaagttcatctgcacaaccggcaaactaccggtgccctggcccaccctcgtgaccacccttacctacggagtccagtgcttcagtcggtaccccgaccacatgaagcagcacgacttcttcaagtccgccatgcccgagggctacgtgcaggagaggaccatcttctttaaggacgacggtaactataagaccagagccgaggtgaagttcgagggtgacaccctggtgaacagaatcgagctgaagggcatcgacttcaaagaggacggcaacatcctcggccacaagctggagtacaactacaacagccacaacgtgtacatcatggccgacaaacagaagaacgggatcaaggtgaactttaagatcagacacaacatcgaggacggcagcgtgcagctcgccgaccactaccagcagaacacacccatcggcgacggtcccgtgctgctgcccgacaaccattacctgagcacccagagcgccctttccaaggaccctaacgagaagagagatcacatggtgctgctcgagtttgtgaccgccgccggcatcaccctgggcatggacgagctttacaagagatcccgcgacatcagccacggctttcctccagccgtggctgcccaagacgacgggaccctgcccatgagctgcgcccaggagtccggcatggacagacaccccgccgcctgtgccagcgccaggatcaacgtgtaa

SEQ ID NO: 1080 - DNA, 855 bp, Artificial Sequence
  Modified Open Reading Frame
atggtgtccaagggcgaggagctgttcaccggcgtggtgccaatcctggtggagctggacggcgacgtgaacggccacaagtttagcgtgtccggcgagggcgaaggcgacgcaacctacggcaagctgacactgaagttcatctgcacaaccggcaaactaccggtgccctggcccaccctcgtgaccaccctgacctacggagtccagtgcttcagtcggtaccccgaccacatgaagcagcacgacttcttcaagtccgccatgcccgagggctacgtgcaggaaagaaccatcttctttaaggacgacggtaactataagaccagagccgaggtgaagttcgagggtgacaccctggtgaacagaatcgagctgaagggcatcgacttcaaagaggacggcaacatcctcggccacaagctggagtacaactacaacagccacaacgtgtacatcatggccgacaaacagaagaacgggatcaaggtgaactttaagatcagacacaacatcgaggacggcagcgtgcagctcgccgaccactaccagcagaacacacccatcggcgacggtcccgtgctgctgcccgacaaccattacctgagcacccagagcgccctgtccaaggaccctaacgagaagagagatcacatggtgctgctcgagtttgtgaccgccgccggcatcaccctgggcatggacgagctttacaagagatcccgcgacatcagccacggctttcctccagccgtggctgcccaagacgacgggaccctgcccatgagctgcgcccaggagtccggcatggacagacaccccgccgcctgtgccagcgccaggatcaacgtgtaa

SEQ ID NO: 1081 - DNA, 855 bp, Artificial Sequence
  Modified Open Reading Frame
atggtttccaagggcgaggagctgtttaccggcgtggtgcctatcctcgtggagctggacggcgacgtgaacgggcacaagtttagcgtgtccggagagggcgagggggacgccacctacgggaagctgaccttgaagttcatctgtaccaccggcaaactgcccgtgccctggcctacgttggtcaccaccctgacctacggagtccagtgcttcagtaggtaccccgaccacatgaagcagcacgacttcttcaagtccgccatgcctgagggctatgtccaagaacgtaccatcttctttaaagacgacggcaactataagactagagccgaagtcaagttcgagggggacacccttgtgaacagaatcgagctgaagggcatcgattttaaagaggatggtaacattcttgggcataagctggagtataactacaacagccacaacgtctacatcatggcggacaagcagaagaatggtatcaaggtgaactttaagatcagacacaacatagaggacggcagcgtgcagcttgccgaccactatcagcagaacacgccgatcggcgacggtcccgtgctgctgcccgacaaccattatctgagcactcagagcgccctctccaaggaccctaacgagaagagagaccacatggtcctcctcgagttcgttaccgccgccggcatcaccctgggcatggacgagctttataagcggtcccgcgacatcagccacggctttcctccagccgtggcggcccaggacgatgggaccttgccgatgagctgcgcgcaggagtccggcatggacagacatccggccgcctgcgctagcgctaggatcaatgtgtaa

SEQ ID NO: 1082 - DNA, 855 bp, Artificial Sequence
  Modified Open Reading Frame
atggtaagtaagggtgaagagctcttcaccggcgtcgtccccatcctcgtcgagttagacggagatgtgaatggtcacaagttctccgtctccggcgagggtgagggcgacgccacctacggcaagttaactcttaagtttatttgcacgacaggtaaattaccagtaccctggccgacactggtcaccacacttacgtatggtgtccagtgcttcagtcggtatcccgaccatatgaagcagcacgacttcttcaagtcggccatgcccgagggttatgtccaggagcggaccatctttttcaaagatgacgggaactataagacacgggccgaggttaagttcgagggcgacactctggtgaatcgcatcgaacttaagggtatcgactttaaggaggacgggaacatactggggcacaagctggagtacaactataactcgcataatgtctatatcatggctgataagcagaagaatggcatcaaggtcaacttcaagattagacataatatcgaggatggtagtgtccagctggccgaccattaccagcagaatactccgattggtgatggtccagtattgcttcccgataatcactacctgtcgacccagtcggccctgtctaaggacccgaatgaaaagcgggaccatatggtcctgcttgagttcgttaccgctgctggcataaccctgggcatggacgagttgtacaagaggtcgcgcgacatcagccatggcttccccccggctgttgctgcgcaggacgatgggactcttcccatgtcctgcgcgcaggagtcggggatggatcgccatccggctgcgtgtgcgtcggccaggattaatgtttaa

SEQ ID NO: 1083 - DNA, 855 bp, Artificial Sequence
  Modified Open Reading Frame
atggttagcaagggcgaggagctcttcaccggcgtcgtgccgatcctggtggagctggacggagacgtgaacggccacaagttcagcgtgagcggtgagggtgagggtgacgcgacctacggcaagctcaccctcaagttcatctgcaccaccggcaagctgccggtgccgtggccgaccctcgtgactaccctcacctacggcgtgcagtgcttcagccggtacccggaccacatgaagcagcacgacttcttcaagtctgcgatgccggagggctacgtgcaggagcggaccatcttcttcaaggacgatggcaactacaagacccgggctgaggtgaagttcgagggtgacaccctcgtgaaccggatcgagcttaagggcatcgacttcaaggaggacggcaacatcctcggccataagctcgagtacaattataacagccataatgtgtacatcatggcggacaagcagaagaacggcatcaaggtgaacttcaagatccggcacaacatcgaggacggctccgtccagctcgcggaccactaccagcagaacaccccgatcggcgacggcccggtgctcctccccgataaccattacctcagcacgcagagcgcgctcagcaaggacccgaacgagaagcgggaccacatggtgctcctcgagttcgtgaccgcggcgggaataacccttggcatggacgagctctacaagcggagccgggacatcagccacgggttcccgccggcggtcgcggcgcaggacgacgggaccctcccgatgtcctgcgcgcaggagagcggcatggaccggcacccggcggcgtgcgcgagcgcgcggatcaacgtgtag

SEQ ID NO: 1084 - DNA, 855 bp, Artificial Sequence
  Modified Open Reading Frame
atggtaagcaaaggtgaagagttgttcaccggcgtggtccccatcctagtggagctggatggggacgtcaacgggcacaaattctccgtcagtggtgagggagagggcgacgccacgtacggtaaacttacccttaagtttatctgtacgactggcaagttgcccgtgccctggcccacgctggtgacaactctgacatacggggtacagtgtttttcacggtaccccgaccacatgaaacagcatgatttctttaagtccgccatgcctgaaggatatgtacaagaacgtactatattcttcaaggatgacggaaattacaagacccgtgccgaggttaaattcgagggggacacattggtcaatcgcatcgagttaaaggggatcgacttcaaggaggacggaaatatactcgggcataagctcgagtataattacaacagccataatgtttacattatggctgataaacaaaagaacgggatcaaggtgaactttaagatccgtcataacatcgaagacggatctgttcagcttgctgatcattatcagcaaaacacacctattggtgatggtcccgttctgctgccggacaatcactatttgtccacgcagtccgccctctcgaaggatcccaacgagaagcgagaccacatggtcctcctcgaatttgtgactgcggcgggaatcactctcgggatggacgagttatacaagcggtcccgagatatttctcatggattcccgcctgcagtcgcggcacaggacgatggcactttgccaatgtcctgtgcccaagaatccggcatggatcgccacccggcggcgtgcgcgagcgcacgcataaatgtctaa

SEQ ID NO: 1085 - DNA, 855 bp, Artificial Sequence
  Modified Open Reading Frame
atggtgtccaagggcgaggagctgttcaccggcgtggtgccaatcctggtggagctggacggcgacgtgaacggccacaagtttagcgtgtccggcgagggcgaaggcgacgcaacctacggcaagctgacactgaagttcatctgcacaaccggcaaactaccggtgccctggcccaccctcgtgaccaccctgacctacggagtccagtgcttcagcagataccccgaccacatgaagcagcacgacttcttcaagtccgccatgcccgagggctacgtgcaggaaagaaccatcttctttaaggacgacggtaactataagaccagagccgaggtgaagttcgagggtgacaccctggtgaacagaatcgagctgaagggcatcgacttcaaagaggacggcaacatcctcggccacaagctggagtacaactacaacagccacaacgtgtacatcatggccgacaaacagaagaacgggatcaaggtgaactttaagatcagacacaacatcgaggacggcagcgtgcagctcgccgaccactaccagcagaacacacccatcggcgacggtcccgtgctgctgcccgacaaccattacctgagcacccagagcgccctgtccaaggaccctaacgagaagagagatcacatggtgctgctcgagtttgtgaccgccgccggcatcaccctgggcatggacgagctttacaagagatcccgcgacatcagccacggctttcctccagccgtggctgcccaagacgacgggaccctgcccatgagctgcgcccaggagtccggcatggacagacaccccgccgcctgtgccagcgccaggatcaacgtgtaa

SEQ ID NO: 1086 - DNA, 855 bp, Artificial Sequence
  Modified Open Reading Frame
atggtaagtaaaggagaagaattgttcaccggggtggttcccatcctcgtcgagctcgacggggatgtgaacggccacaaatttagtgtgtcgggggaaggggagggtgacgcgacgtacggtaagcttacacttaagtttatctgtacgacgggtaaactccccgttccctggcccacactggtgactacgctcacctacggtgttcagtgcttctcaaggtatcccgatcatatgaaacagcacgatttttttaagtccgccatgcctgaaggatacgtccaggaaaggacgatattcttcaaggatgacggaaattataaaactcgtgctgaggtaaagtttgagggggataccttggttaatagaatcgagctgaagggcatcgattttaaggaggatggtaatattctagggcataaattagaatataactataactcccacaacgtgtacatcatggcagataaacagaagaacggaattaaggtgaactttaagatccggcataatattgaggatgggtctgtgcagctcgcggaccactatcagcaaaatacgccgataggtgatggtcctgtcctactcccggacaaccattacctatcaactcagtcggcgctgtcaaaggaccccaacgagaaacgtgatcacatggtcttgttggagttcgtgacagctgccggtataactctcggaatggacgagttatacaaacggagccgggatatttcccatggcttcccgcctgccgtggcggcgcaagacgatgggacacttcccatgtcttgcgcgcaggagagcggcatggacaggcatcctgctgcctgtgcatctgccaggataaatgtgtga

SEQ ID NO: 1087 - DNA, 855 bp, Artificial Sequence
  Modified Open Reading Frame
atggtgtccaagggcgaggagctgttcaccggcgtggtgcctatcctggtggagctggacggcgacgtgaacggccacaagtttagcgtgtccggagaaggcgaaggcgacgccacctacggcaagctgaccctgaagttcatctgcaccaccggcaaactgcccgtgccctggcccaccctcgtgaccaccctgacctacggagtccagtgtttcagcagataccccgaccacatgaagcagcacgacttcttcaagtccgccatgcccgagggctacgtgcaggaaagaaccatcttctttaaggacgacggaaactataagaccagagccgaggtgaagttcgagggagacaccttggtgaacagaatcgagctgaagggcatcgacttcaaagaggacggcaacatcctgggccacaaactggagtacaactacaacagccacaacgtgtacatcatggccgacaaacagaagaacgggatcaaggtgaactttaagatcagacacaacatcgaagacggcagcgtgcagctcgccgaccactaccagcagaacacacccatcggcgacggacccgtgctgctgcccgacaaccattacctgagcacccagagcgccctctccaaggaccctaacgagaagagagatcacatggtgctgctcgagttcgtgaccgccgccggcatcaccctgggcatggacgagctgtacaagagatcccgcgacatcagccacggctttcctcccgccgtggccgcccaagacgacgggaccctgcccatgagctgcgcacaggagtccggcatggacagacaccccgccgcctgtgccagcgccaggatcaacgtgtaa

SEQ ID NO: 1088 - DNA, 855 bp, Artificial Sequence
  Modified Open Reading Frame
atggtatccaaaggcgaggagctattcacaggcgtcgtccctatattggtggagctggatggcgatgtaaatggacacaagttttctgtgtcgggggagggcgagggcgacgcgacgtacgggaagcttaccctgaagttcatctgcactacgggtaagcttcctgtgccttggcccactttggtaactacactgacgtacggcgtgcagtgcttctcgcggtatcctgatcacatgaaacagcacgactttttcaaatcggcgatgcctgagggttatgtccaggaacgtaccatcttctttaaggacgatggcaattacaagacccgggccgaggtgaagttcgagggcgacaccttggtgaaccggatcgagctgaagggcatcgactttaaggaggatggtaacatcctgggccacaagttggaatacaactataactctcacaatgtctacatcatggcagacaagcagaagaatggtatcaaagtaaacttcaaaatccggcacaacattgaagacggttctgttcagctggcggaccactaccagcagaacacgccgatcggggacggcccggtactcttacccgacaaccactacctgtcgactcagtctgcactgtccaaggatcccaacgagaagcgtgatcacatggttctgttggagtttgtgacggccgccggcatcacgctgggcatggacgagctgtacaaacgatcccgggacatcagccacggctttcctcccgccgtggctgcccaggacgacgggaccctgcccatgagctgcgcacaggagtccggcatggacagacaccccgccgcctgtgccagcgccaggatcaacgtctaa

SEQ ID NO: 1089 - DNA, 855 bp, Artificial Sequence
  Modified Open Reading Frame
atggtaagtaaaggtgaggagctattcacgggggttgtccctattctcgtagaactggatggcgatgtgaatgggcataagttcagtgttagtggagaaggtgagggggacgcaacgtacgggaaactcacactgaagtttatctgtacaacaggcaagctgcctgtcccatggcccacgttggttactacgctgacatatggagtccaatgcttctcgcgctatcctgatcatatgaaacagcacgatttctttaagagtgctatgcccgaaggttacgtacaggaacggacgatcttttttaaagacgacggtaattacaagacgagagctgaggtgaagtttgagggggacacactggtgaatcgaattgagctgaagggaattgacttcaaagaggacggtaatatactaggacataagttggaatataactacaactctcacaatgtttatatcatggcggataagcaaaagaatggcataaaggtaaactttaaaatcaggcacaatatagaggatggttccgtccaattagcagatcattatcaacagaatactcccattggagatggtcccgtgctactaccggataaccattacctttcaacccaatcggccctatccaaagatcccaatgagaagagagatcacatggtgctgttggaattcgtaaccgccgctggaattactctcggtatggatgaactctacaagcggtcccgcgatatttctcatggttttcctcctgccgtcgcggcacaagatgatggtacactgccaatgtcatgcgctcaagagagcggaatggaccgccaccctgcagcatgtgctagcgcgcggataaatgtctaa

SEQ ID NO: 1090 - DNA, 855 bp, Artificial Sequence
  Modified Open Reading Frame
atggtgtccaagggcgaggagctcttcaccggcgtggtgcctatcctggtggagctggacggcgacgtgaacggccacaagtttagcgtgtccggagagggcgaaggggacgccacctatggcaagctgaccttgaagttcatctgcaccaccggcaaactgccggtgccatggcccacgctggtgaccaccctgacctatggagtccagtgcttcagccgatacccggatcacatgaagcagcacgacttcttcaagtccgcgatgcccgagggctacgtccaggaaagaaccatcttctttaaggacgacgggaactataagaccagagccgaggttaagttcgagggagacaccctggtgaaccgtatcgagctgaagggcatcgacttcaaagaggatggcaacatcctgggccataagctggagtacaactacaacagccacaacgtgtacatcatggccgacaaacagaagaacgggatcaaggtgaactttaagatcagacacaacatcgaggacggcagtgtgcagctcgccgatcactaccagcagaacacgccgatcggcgacggtcccgtgctgctgcccgacaaccattacttgtcgacccagagcgccctctccaaggaccctaacgagaagagagatcacatggtgctgctcgagttcgttaccgccgccggcatcaccctgggcatggacgagctgtacaagagatcccgcgacatcagccacggctttcctcccgccgtggccgcgcaagacgatgggacccttcccatgtcttgcgcacaggagtccgggatggacaggcacccagctgcctgtgccagtgcccggattaatgtgtaa

SEQ ID NO: 1091 - DNA, 855 bp, Artificial Sequence
  Modified Open Reading Frame
atggtgtccaagggcgaggagctgttcaccggcgtggtgcctattctggtggagctggacggcgacgtgaacggccacaagtttagcgtgtccggcgagggcgaaggcgatgccacctacggcaagctgaccctgaagttcatctgcaccaccggcaaattgcccgtgccctggcccaccctcgtgaccaccctgacctacggagtccagtgcttcagcagataccccgaccacatgaagcagcacgacttcttcaagtccgccatgcccgagggctacgtgcaggaaagaaccatcttctttaaggacgacggaaactataagactagagccgaggtgaagttcgagggagacaccctggtgaacagaatcgagctgaagggcatcgacttcaaagaggacggcaacatcctgggccacaaactggagtacaactacaacagccacaacgtgtacatcatggccgacaaacagaagaacgggatcaaggtgaactttaagatcagacacaacatcgaagatggcagcgtgcagctcgccgaccactaccagcagaacacacccatcggcgatggacccgtgcttctgcccgacaaccattacctgagcacccagagcgccctgtccaaggaccctaacgagaagagagatcacatggtgctgctcgagttcgttaccgccgccggcatcaccctgggcatggacgagctgtacaagagatcccgcgacatcagccacggctttcctcccgccgtggctgcccaagacgacgggaccctccccatgagctgcgcccaggagtccggcatggacagacaccccgccgcctgtgccagcgccaggatcaacgtgtaa

SEQ ID NO: 1092 - DNA, 855 bp, Artificial Sequence
  Modified Open Reading Frame
atggtgtccaagggcgaggagctgttcaccggcgtggtgcctattctggtggagctggacggcgacgtgaacggccacaagtttagcgtgtccggcgagggcgaaggcgatgccacctacggcaagctgaccctgaagttcatctgcaccaccggcaaattgcccgtgccctggcccaccctcgtgaccaccctgacctacggagtccagtgcttcagcagataccccgaccacatgaagcagcacgacttcttcaagtccgccatgcccgagggctacgtgcaggaaagaaccatcttctttaaggacgacggaaactataagactagagccgaggtgaagttcgagggagacaccctggtgaacagaatcgagctgaagggcatcgacttcaaagaggacggcaacatcctgggccacaaactggagtacaactacaacagccacaacgtgtacatcatggccgacaaacagaagaacgggatcaaggtgaactttaagatcagacacaacatcgaagatggcagcgtgcagctcgccgaccactaccagcagaacacacccatcggcgatggacccgtgcttctgcccgacaaccattacctgagcacccagagcgccctgtccaaggaccctaacgagaagagagatcacatggtgctgctcgagttcgttaccgccgccggcatcaccctgggcatggacgagctgtacaagagatcccgcgacatcagccacggctttcctcccgccgtggctgcccaagacgacgggaccctgcccatgagctgcgcccaggagtccggcatggacagacaccccgccgcctgtgccagcgccaggatcaacgtgtaa

SEQ ID NO: 1093 - DNA, 855 bp, Artificial Sequence
  Modified Open Reading Frame
atggtgtccaagggcgaggagctgttcaccggcgtggtgcctattctggtggagctggacggcgacgtgaacggccacaagtttagcgtgtccggcgagggcgaaggcgatgccacctacggcaagctgaccctgaagttcatctgcaccaccggcaaattgcccgtgccctggcccaccctcgtgaccaccctgacctacggagtccagtgcttcagcagataccccgaccacatgaagcagcacgacttcttcaagtccgccatgcccgagggctacgtgcaggaaagaaccatcttctttaaggacgacggaaactataagactagagccgaggtgaagttcgagggagacaccctggtgaacagaatcgagctgaagggcatcgacttcaaagaggacggcaacatcctgggccacaaactggagtacaactacaacagccacaacgtgtacatcatggccgacaaacagaagaacgggatcaaggtgaactttaagatcagacacaacatcgaagatggcagcgtgcagctcgccgaccactaccagcagaacacacccatcggcgatggacccgtgcttctgcccgacaaccattacctgagcacccagagcgccctgtccaaggaccctaacgagaagagagatcacatggtgctgctcgagttcgttaccgccgccggcatcaccctgggcatggacgagctgtacaagagatcccgcgacatcagccacggctttcctcccgccgtggccgcccaagacgacgggaccctgcccatgagctgcgcccaggagtccggcatggacagacaccccgccgcctgtgccagcgccaggatcaacgtgtaa

SEQ ID NO: 1094 - DNA, 855 bp, Artificial Sequence
  Modified Open Reading Frame
atggtatctaaaggtgaagaactattcacaggtgttgtgcctatcttggtagaactcgacggagatgtgaacggtcacaaattctccgtcagtggcgagggcgaaggtgacgccacgtacggtaaactgacgttgaagtttatctgtacgactggcaagttacctgtgccctggccgaccttggtgacgactttaacatatggtgtccagtgttttagtcgttaccccgatcacatgaagcagcatgacttctttaagagtgcgatgcccgaaggatacgttcaagaaagaacgatattcttcaaagacgacggcaactataagactagggccgaagtcaagttcgaaggtgacacacttgtcaaccgtatcgaacttaagggcatcgactttaaagaagacggtaatatactcgggcataagctcgagtataattacaacagccataatgtttacattatggctgataaacagaagaacgggatcaaggtcaacttcaagataaggcacaacatcgaggacgggtccgtccaacttgctgatcattatcagcaaaatacaccgataggggacggacccgtcctccttcctgacaatcactatttgtccactcaatctgcgttgagtaaagatcccaatgaaaaacgggatcacatggttctgctagagttcgtcactgccgcagggataaccctgggcatggacgaactctacaagcggagccgggatatttcccatggctttccgccagcagtggccgcgcaagacgatgggacacttcccatgtcttgcgcgcaggagagcggcatggacaggcatcctgctgcctgtgcatctgccaggataaatgtgtga

SEQ ID NO: 1095 - DNA, 855 bp, Artificial Sequence
  Modified Open Reading Frame
atggtgtccaagggcgaggagctttttacaggggtggttccgatactggtggaattggacggcgacgtgaacggccacaagttttctgtgagtggtgagggtgaaggtgatgccacatatggcaagctgaccctgaagttcatatgcacgacgggcaagttaccggtgccgtggcccaccctggtcaccaccctgacctacggagtccagtgcttctctcggtatccggatcatatgaaacagcatgacttcttcaagagtgctatgccagaaggttatgtccaggagcgtaccatcttctttaaagacgatggtaactacaaaacgagggccgaggtgaagttcgaaggagacaccctggtcaatcgtattgagttgaagggcatcgactttaaagaagatggtaacatccttggacataagcttgagtacaactataacagtcataatgtttacataatggccgataaacagaagaatggcatcaaggtaaactttaaaatccgtcataacattgaagacggcagcgtgcagttggcggatcattaccagcaaaacacacccataggagacggtcccgttctgttgcccgacaaccattacctaagtacgcaatcagccctgtcaaaggaccccaacgagaagagggaccatatggtgctgcttgagtttgtcaccgccgccgggatcaccctgggcatggatgagctttataagcgcagccgtgacatcagccacggcttcccgccggcggtggccgcgcaggacgacgggaccctgcccatgagctgtgcccaagagtccggcatggacagacaccccgccgcctgtgcgtctgcgcgtataaacgtgtga

SEQ ID NO: 1096 - DNA, 855 bp, Artificial Sequence
  Modified Open Reading Frame
atggtgtccaagggcgaggagctttttacaggggtggttccgatactggtggaattggacggcgacgtgaacggccacaagttttctgtgagtggtgagggtgaaggtgatgccacatatggcaagctgaccctgaagttcatatgcacgacgggcaagttaccggtgccgtggcccaccctggtcaccaccctgacctacggagtccagtgcttctctcggtatccggatcatatgaaacagcatgacttcttcaagagtgctatgcctgaaggttatgtccaggagcgtaccatcttctttaaagacgatggtaactacaaaacgagggccgaggtgaagttcgaaggagacaccctggtcaatcgtattgagttgaagggcatcgactttaaagaagatggtaacatccttggacataagcttgagtacaactataacagtcataatgtttacataatggcggataaacagaagaatggcatcaaggtaaactttaaaatccgtcataacattgaagacggcagcgtgcagttggcggatcattaccagcaaaacacacccataggagacggtcccgttctgttgccggacaaccactacctaagtacgcaatcagccctgtcaaaggatcctaacgagaagagggaccatatggtgctgcttgagtttgtcaccgccgccgggatcaccctgggcatggatgagctttataagcgcagccgtgacatcagccacggcttcccgccggcggtggccgcgcaggacgacgggaccctgcccatgagctgtgcccaagagtccggcatggacagacaccccgccgcctgtgcgtctgcgcgtataaacgtgtga

SEQ ID NO: 1097 - DNA, 855 bp, Artificial Sequence
  Modified Open Reading Frame
atggtgtcgaagggcgaggagctgttcaccggcgtggtgcccatcctggtggagctggacggcgacgtgaacggccacaagttctctgtgtctggcgagggcgagggcgacgccacctacggcaagcttaccctgaagttcatctgcaccacgggtaagctgcccgtgccctggcccaccttggtgaccaccctgacctacggcgtgcagtgcttctcgcggtaccccgaccacatgaagcagcacgacttcttcaagtcggccatgcccgagggctacgtccaggagcggaccatcttctttaaggacgatggcaattacaagacccgggccgaggtgaagttcgagggcgacaccttggtgaaccggatcgagctaaagggcatcgactttaaggaggatggcaacatcctgggccacaagctggagtacaactacaactctcacaacgtgtatatcatggccgacaagcagaagaatggcatcaaggtgaacttcaagatccggcacaacatcgaggacggctctgttcagctcgccgaccactaccagcagaacaccccgatcggtgacggccccgtgctgctgcccgacaaccactacttgtcgacccagtcagcactgtctaaggacccgaacgagaagcgggaccacatggtgctgctggagttcgtcaccgccgcggggatcaccctcggcatggacgagctgtacaagagatcccgcgacatcagccacggctttcctcccgccgtggccgcccaagacgacgggaccctgcccatgagctgcgcccaggagtccggcatggacagacaccccgccgcctgtgccagcgccaggatcaacgtgtaa

SEQ ID NO: 1098 - DNA, 855 bp, Artificial Sequence
  Modified Open Reading Frame
atggtgtcaaagggcgaggagcttttcacaggggtggttccgatactggtagagttggacggcgacgtgaacgggcacaagttttctgtgagtggtgagggtgaaggtgacgccacctacggcaagctgacgttgaagttcatatgtacgacgggtaagttgccggtgccatggccgacgctggtcaccactctgacctatggggtccagtgcttctctagatatccggaccatatgaagcagcatgacttctttaagagtgctatgcctgaaggttatgtccaggagcgtaccatcttctttaaagacgatggtaactacaagacgagggccgaggtgaagttcgagggcgacaccttggtcaatcgtattgagttgaagggcatcgactttaaagaagatggtaacattcttggacataagcttgagtataactataacagtcataatgtttacatcatggcggataagcagaagaatggcatcaaggtaaactttaagatccgtcacaacattgaagacggcagtgtgcagttggcggaccattaccagcagaacacacccataggagacggtcccgttctgttgccggacaaccactacctgagtacgcaatcagccctgtcaaaggatcctaacgaaaagagggaccacatggtccttcttgagtttgtcaccgccgccgggatcacgctgggcatggatgagctttacaagcgcagccgtgacatcagccatggcttcccgccggcggtggccgcgcaggacgacgggaccctgcccatgagctgcgctcaggagtccggcatggacaggcatcccgccgcctgtgcgtctgcgcgtatcaacgtgtag

SEQ ID NO: 1099 - DNA, 855 bp, Artificial Sequence
  Modified Open Reading Frame
atggtgagcaaaggcgaggagctattcaccggagtggttccgatattagtggaacttgacggagatgtaaatgggcataagttctcagtttcaggtgagggcgaaggtgatgccacttacggcaaacttacgttgaaatttatatgtacaacagggaaactaccagtgccgtggccaacccttgtcactacgctgacttacggagtccagtgtttcagcaggtatccggaccatatgaagcaacatgactttttcaagtcagcaatgccagagggttacgttcaggagcgcacaatattctttaaggatgatggtaattataaaactcgcgctgaggtgaagtttgagggagatacattggtgaatcggattgaattaaagggtatagactttaaggaggatggcaatatattgggtcataagcttgagtataactataatagtcacaacgtttatatcatggctgacaaacagaagaatggtataaaggtaaactttaagatccgccataacatcgaggatgggagtgttcagttggccgatcattaccagcagaacactccaattggtgatggaccagtgctactacctgacaatcattatctaagcacgcagtctgccttatccaaagacccgaacgagaagagggatcatatggtactgttggaattcgttactgcggcaggcatcactttgggcatggacgaattatataagcggtctagggatatcagccacggatttccaccggccgttgcagcccaggatgatgggactctgcccatgagctgtgcccaggaatcagggatggatcgccatcccgcagcctgtgcaagtgccaggattaatgtctaa

SEQ ID NO: 1100 - DNA, 855 bp, Artificial Sequence
  Modified Open Reading Frame
atggtgtccaagggcgaggagctgttcaccggtgtcgtccccatattggtggagctggacggcgatgtgaatggacacaagttttctgtgtcgggggagggcgagggcgacgcgacgtacgggaagcttaccctgaagttcatctgcactacgggtaagcttcctgtgccttggcctactttggtaactacactgacgtacggcgtgcagtgcttctcgcggtatcctgatcacatgaaacagcacgactttttcaaatcggcgatgcctgagggttatgtccaggaacgtaccatcttctttaaggacgatggcaattacaagacccgggccgaggtgaagttcgagggcgacaccttggtgaaccggatcgagctgaagggcatcgactttaaggaggatggtaacatcctgggccacaagttggaatacaactataactctcacaatgtctacatcatggcagacaagcagaagaatggtatcaaagtaaacttcaaaatccggcacaacattgaagacggttctgttcagctggcggaccactaccagcagaacacgccgattggggacggcccggtgctcctgcccgacaaccattacctgtcgactcaatctgcattgtccaaggatcccaacgagaagcgtgatcacatggttctgttggagtttgtgacggccgccggcatcacgctgggcatggacgagctgtacaaaagatcccgggacatcagccacggctttcctcccgccgtggccgcccaagacgacgggaccctgcccatgagctgcgcacaggagtccggcatggacagacaccccgccgcctgtgccagcgccaggatcaacgtctaa

SEQ ID NO: 1101 - DNA, 855 bp, Artificial Sequence
  Modified Open Reading Frame
atggtgtccaagggcgaggagctgttcaccggcgtggtgcctatcctggtggagctggacggcgacgtgaacggccacaagtttagcgtgtccggcgagggcgaaggcgacgccacctacggcaagctgaccctgaagttcatctgcaccaccggcaaactgcccgtgccctggcccaccctcgtgaccaccctgacctacggagtccagtgcttcagcagataccccgaccacatgaagcagcacgacttcttcaagtccgccatgcccgagggctacgtgcaggaaagaaccatcttctttaaggacgacggaaactataagaccagagccgaggtgaagttcgagggagacaccctggtgaacagaatcgagctgaagggcatcgacttcaaagaggacggcaacatcctgggccacaagctggagtacaactacaacagccacaacgtgtacatcatggccgacaaacagaagaacgggatcaaggtgaactttaagatcagacacaacatcgaagacggcagcgtgcagctcgccgaccactaccagcagaacacacccatcggcgacggacccgtgctgctgcccgacaaccattacctgagcacccagagcgccctgtccaaggaccctaacgagaagagagatcacatggtgctgctcgagttcgtgaccgccgccggcatcaccctgggcatggacgagctgtacaagagatcccgcgacatcagccacggctttcctccggccgtggccgcccaagacgacgggaccctgcccatgagctgcgcccaggagtccggcatggacagacaccccgccgcctgtgccagcgccaggatcaacgtgtaa

SEQ ID NO: 1102 - DNA, 855 bp, Artificial Sequence
  Modified Open Reading Frame
atggtgtccaagggcgaggagctgttcaccggcgtggtgcctatcctggtggagctggacggcgacgtgaacggccacaagtttagcgtgtccggcgagggcgaaggcgacgccacctacggcaagctgaccctgaagttcatctgcaccaccggcaaactgcccgtgccctggcccaccctcgtgacaaccctgacctacggagtccagtgcttcagcagataccccgaccacatgaagcagcacgacttcttcaagtccgccatgcccgagggctacgtgcaggaaagaaccatcttctttaaggacgacggaaactataagaccagagccgaggtgaagttcgagggagacaccctggtgaacagaatcgagctgaagggcatcgacttcaaagaggacggcaacatcctgggccacaagctggagtacaactacaacagccacaacgtgtacatcatggccgacaaacagaagaacgggatcaaggtgaactttaagatcagacacaacatcgaagacggcagcgtgcagctcgccgaccactaccagcagaacacacccatcggcgacggacccgtgctgctgcccgacaaccattacctgagcacccagagcgccctgtccaaggaccctaacgagaagagagatcacatggtgctgctcgagttcgtgaccgccgccggcatcaccctgggcatggacgagctgtacaagagatcccgcgacatcagccacggctttcctccggccgtggccgcccaagacgacgggaccctgcccatgagctgcgcccaggagtccggcatggacagacaccccgccgcctgtgccagcgccaggatcaacgtgtaa

SEQ ID NO: 1103 - DNA, 855 bp, Artificial Sequence
  Modified Open Reading Frame
atggtttcaaagggtgaggagctttttacaggggtggttccgatactggtggaattggacggcgacgtgaacggccacaagttttctgtgagtggtgagggtgaaggtgatgccacatatggcaagctgaccctgaagttcatatgcacgacgggcaagttaccggtgccgtggcccaccctggtcaccaccctgacctacggagtccagtgcttctctcggtatccggatcatatgaaacagcatgacttcttcaagagtgctatgcctgaaggttatgtccaggagcgtaccatcttctttaaagacgatggtaactacaaaacgagggccgaggtgaagttcgaaggagacaccctggtcaatcgtattgagttgaagggcatcgactttaaagaagatggtaacatccttggacataagcttgagtacaactataacagtcataatgtttacataatggcggataaacagaagaatggcatcaaggtaaactttaaaatccgtcataacattgaagacggcagcgtgcagttggcggatcattaccagcaaaacacacccataggagacggtcccgttctgttgccggacaaccactacctaagtacgcaatcagccctgtcaaaggatcctaacgagaagagggaccatatggtgctgcttgagtttgtcaccgccgccgggatcaccctgggcatggatgagctttataagcgcagccgtgacatcagccatggcttcccgccggcggtggccgcgcaggacgacgggaccctgcccatgagctgtgcccaagagtccggcatggacagacaccccgccgcctgtgcgtctgcgcgtataaacgtgtga

SEQ ID NO: 1104 - DNA, 855 bp, Artificial Sequence
  Modified Open Reading Frame
atggtgtccaagggcgaggagctgttcaccggtgtcgtccccatattggtggagctggacggcgatgtgaatggacacaagttttctgtgtcgggggagggcgagggcgacgcgacgtacgggaagcttaccctgaagttcatctgcactacgggtaagcttcctgtgccttggcctactttggtaactacactgacgtacggcgtgcagtgcttctcgcggtatcctgatcacatgaaacagcacgactttttcaaatcggcgatgcctgagggttatgtccaggaacgtaccatcttctttaaggacgatggcaattacaagacccgggccgaggtgaagttcgagggcgacaccttggtgaaccggatcgagctgaagggcatcgactttaaggaggatggtaacatcctgggccacaagttggaatacaactataactctcacaatgtctacatcatggcagacaagcagaagaatggtatcaaagtaaacttcaaaatccggcacaacattgaagacggttctgttcagctggcggaccactaccagcagaacacgccgattggggacggcccggtgctcctgcccgacaaccattacctgtcgactcaatctgcattgtccaaggatcccaacgagaagcgtgatcacatggttctgttggagtttgtgacggccgccggcatcacgctgggcatggacgagctgtacaaaagatcccgcgacatcagccacggctttcctcccgccgtggccgcccaagacgacgggaccctgcccatgagctgcgcccaggagtccggcatggacagacaccccgccgcctgtgccagcgccaggatcaacgtctaa

SEQ ID NO: 1105 - DNA, 855 bp, Artificial Sequence
  Modified Open Reading Frame
atggtgtccaagggcgaggagctgttcaccggcgtggtgcctatactggtggagctggacggcgacgtgaacgggcacaagtttagcgtgtccggagagggcgagggggacgccacctacgggaagctgaccttgaagttcatctgtaccaccggcaagttgcccgtgccctggcctacgttggtcaccacgttgacctacggagtccagtgcttcagtagatacccggatcacatgaagcagcacgacttcttcaagtccgccatgcctgagggctacgtccaggaaagaaccatcttctttaaggacgacggcaactataagactagagccgaggtcaagttcgagggggacaccctggtgaatagaatcgagctcaagggcatcgacttcaaagaggatggtaatatcctgggccataagctggagtataattacaacagccataacgtctacatcatggcggacaagcagaagaacggtatcaaggtgaactttaagatcagacataatatagaggacggcagcgtgcagctcgccgaccactatcagcagaacacgccgatcggcgacggtcccgtgctgctgcccgacaaccactatctgagcactcagagcgccctctccaaggaccctaacgagaagagagatcacatggtgctgctcgagttcgttaccgccgccggcatcactttgggcatggacgagctgtacaagagatcccgcgacatcagccacggcttcccgccagccgtggcagcacaagacgacgggaccctgccgatgagctgcgcgcaggagtccggcatggatagacatccggccgcctgtgccagcgccaggatcaacgtgtaa

SEQ ID NO: 1106 - DNA, 855 bp, Artificial Sequence
  Modified Open Reading Frame
atggtgtccaagggcgaggagctcttcaccggcgtggtgcccatcctggtggagctggacggcgacgtgaacggccacaagtttagcgtgtccggagagggcgaaggcgatgccacctatggcaagctgaccttgaagttcatctgcacgaccggcaaactgcccgtgccctggcccaccctcgtgacaacgctgacttacggagtccagtgcttcagcaggtaccccgaccacatgaagcagcacgacttctttaagtcagcgatgcccgagggttatgtccaggaaagaaccatcttctttaaggacgacggtaactataagactagagccgaggtcaagttcgagggtgacaccctggtgaacagaatcgagctgaagggcatcgacttcaaagaggatggtaatatcctgggccataagctggagtacaactacaacagccacaacgtgtacatcatggctgacaagcagaagaatgggatcaaggtgaactttaagatcagacacaatatcgaggacggcagcgtgcagctcgccgatcactaccagcagaacacgccgatcggcgacggccccgtgctgctgcccgataaccattatctgagcactcagagcgccctctccaaggaccctaacgagaagagagaccacatggtgctgctcgagttcgttaccgccgccggcatcaccctgggcatggacgagctgtacaagagatcccgcgacatcagccacggctttcctccagccgtggccgcccaagacgacgggaccctgcccatgagctgcgcgcaggagtccggcatggatagacatcctgccgcctgcgccagcgccaggatcaacgtgtga

SEQ ID NO: 1107 - DNA, 855 bp, Artificial Sequence
  Modified Open Reading Frame
atggtgtccaagggcgaggagctgttcaccggcgtggtgcctatcctggtggagctggacggcgacgtgaacggccacaagtttagcgtgtccggagagggcgaaggggatgccacctatggcaagctgaccttgaagttcatctgcaccaccggcaaactgcccgtcccctggcccacgctggtgaccaccctcacttatggagtccagtgcttcagccgataccccgaccacatgaagcagcacgacttcttcaagtccgcgatgcccgagggctacgtccaggaaagaaccatcttctttaaggacgacgggaactacaagacccgagccgaggtcaagttcgagggagacaccctcgtgaacaggatcgagctgaagggcatcgacttcaaggaggacggcaacatcctgggccacaaactggagtacaactacaacagtcacaacgtctacatcatggccgacaagcagaagaacgggatcaaggtgaactttaagatcagacacaatatcgaggacggcagcgtgcagctcgccgatcactaccaacaaaacacaccgatcggcgacgggcccgtgctgctgcccgataatcattacctgagcacccagagcgccctctccaaggacccgaacgagaagagagatcacatggttcttctcgagttcgtgaccgccgccggcatcaccctgggcatggacgagctgtacaagagatcccgcgacatcagccacggctttcctcccgctgtggccgcacaagacgacgggacgctgcccatgagctgcgctcaggagtccggcatggacagacaccccgccgcttgtgccagcgcgaggataaacgtgtaa

SEQ ID NO: 1108 - DNA, 855 bp, Artificial Sequence
  Modified Open Reading Frame
atggtgtccaagggcgaggagctgttcaccggcgtggtgcctatcctggtggagctggacggcgacgtgaacggccacaagtttagcgtgtccggcgagggcgaaggcgacgccacctacggcaagctgaccctgaagttcatctgcaccaccggcaagctgcccgtgccctggcccaccctcgtgaccaccctgacctacggagtccagtgcttcagccggtaccccgaccacatgaagcagcacgacttcttcaagtccgccatgcccgagggctacgtgcaggagagaaccatcttctttaaggacgacggtaactataagactagagccgaggtgaagttcgagggtgataccctggtgaacagaatcgagctgaagggcatcgacttcaaagaggacggtaacatcctgggccataagctggagtataattacaacagccacaatgtgtacatcatggccgacaaacagaagaacgggatcaaggtgaactttaagatcagacacaatatcgaggacggcagcgtgcagctcgccgaccactaccagcagaacacaccgatcggcgacggacccgtgctgctgcccgacaaccactacctgagtactcagagcgccctgtccaaggaccctaacgagaagagagatcacatggtgctgctcgagttcgtgaccgccgccggcatcaccctgggcatggacgagctgtacaagagatcccgcgacatcagccacggctttcctcccgccgtggccgcgcaggacgacgggaccctgcccatgagctgcgctcaggagtccggcatggacagacaccccgccgcctgtgccagcgccaggatcaacgtgtaa

SEQ ID NO: 1109 - DNA, 855 bp, Artificial Sequence
  Modified Open Reading Frame
atggtgtcgaagggcgaggagctgttcaccggtgtggtgcctatcctggtggagctggacggcgacgtgaacggccacaagttctctgtgtctggcgaaggcgagggtgacgccacgtacgggaagcttaccttgaagttcatctgcaccacaggtaagcttcccgtgccgtggcccaccctcgttaccaccttgacgtacggcgtgcagtgcttcagtcggtaccccgaccacatgaagcagcacgacttcttcaagtctgccatgccagagggctacgtccaggaacgtaccatcttctttaaggacgacggcaactataagacccgtgccgaggtcaagttcgagggtgacaccctcgtgaacagaatcgagctgaagggcatcgacttcaaagaggatggtaacatcctgggccacaaactggagtacaactacaactcccacaatgtgtacatcatggcagacaagcagaagaacggcatcaaggtgaactttaagattcgccacaacatagaggacggctctgttcagctcgccgaccactaccagcagaacacccccatcggtgacggccccgtgctgcttcccgacaaccattacctgtcgactcagagcgccctttccaaggaccctaatgagaagcgggatcacatggtgctgctggagttcgtcacagccgcagggatcaccctcggcatggacgagctctacaagagatcccgcgacatcagccacggctttcctccagccgtggctgcccaagacgacgggaccctgcccatgagctgcgcacaggagtccggcatggacagacacccagccgcctgtgccagcgccaggatcaacgtgtaa

SEQ ID NO: 1110 - DNA, 855 bp, Artificial Sequence
  Modified Open Reading Frame
atggtgtcaaagggcgaggagctttttacaggggtggttccgatactggtagagttggacggcgacgtgaacgggcacaagttttctgtgagtggtgagggtgaaggtgacgccacatacggcaagctgacgttaaaattcatatgtacgacgggtaagttaccggtgccatggccgacgctggtcaccactctgacctatggggtccagtgcttctctcggtatccggaccatatgaaacagcatgacttctttaagagtgctatgcctgaaggttatgtccaggagcgtaccatcttctttaaagacgatggtaactacaaaacgagggccgaggtgaagttcgaaggcgacaccttggtcaatcgtattgagttgaagggcatcgactttaaagaagatggtaacattcttggacataagcttgagtataactataacagtcataatgtttacataatggcggataagcagaagaatggcatcaaggtaaactttaaaatccgtcataacattgaagacggcagtgtgcagttggcggaccattaccagcaaaacacacccataggagacggtcccgttctgttgccggacaaccactacctaagtacgcaatcagccctgtcaaaggatcctaacgaaaagagggaccatatggtccttcttgagtttgtcaccgccgccgggatcacgctgggcatggatgagctttataagcgcagccgtgacatcagccatggcttcccgccggcggtggccgcgcaggacgacgggaccctgcccatgagctgtgctcaagagtccggcatggacaggcatcccgccgcctgtgcgtctgcgcgtataaacgtgtag

SEQ ID NO: 1111 - DNA, 855 bp, Artificial Sequence
  Modified Open Reading Frame
atggtctcaaagggagaggagcttttcacaggggtggttccgatactggtagagttggacggcgacgtgaacgggcacaagttttctgtgagtggtgagggtgaaggtgacgccacatacggcaagctgacgttaaaattcatatgtacgacgggtaagttaccggtgccatggccgacgctggtcaccactctgacctatggggtccagtgcttctctcggtatccggaccatatgaaacagcatgacttctttaagagtgctatgcctgaaggttatgtccaggagcgtaccatcttctttaaagacgatggtaactacaaaacgagggccgaggtgaagttcgaaggcgacaccttggtcaatcgtattgagttgaagggcatcgactttaaagaagatggtaacattcttggacataagcttgagtataactataacagtcataatgtttacataatggcggataagcagaagaatggcatcaaggtaaactttaaaatccgtcataacattgaagacggcagtgtgcagttggcggaccattaccagcaaaacacacccataggagacggtcccgttctgttgccggacaaccactacctaagtacgcaatcagccctgtcaaaagatcccaacgagaaacgtgatcacatggtccttttagagttcgtcaccgccgccgggatcacgctgggcatggatgagctttataagcgcagccgtgacatcagccatggcttcccgccggcggtggccgcgcaggacgacgggaccctgcccatgagctgtgctcaagagtccggcatggacaggcatcccgccgcctgtgcgtctgcgcgtataaacgtgtag

SEQ ID NO: 1112 - DNA, 855 bp, Artificial Sequence
  Modified Open Reading Frame
atggtgtcgaagggagaggagcttttcacaggggtggttccgatactggtagagttggacggcgacgtgaacgggcacaagttttctgtgagtggtgagggtgaaggtgacgccacatacggcaagctgacgttaaaattcatatgtacgacgggtaagttaccggtgccatggccgacgctggtcaccactctgacctatggggtccagtgcttctctcggtatccggaccatatgaaacagcatgacttctttaagagtgctatgcctgaaggttatgtccaggagcgtaccatcttctttaaagacgatggtaactacaaaacgagggccgaggtgaagttcgaaggcgacaccttggtcaatcgtattgagttgaagggcatcgactttaaagaagatggtaacattcttggacataagcttgagtataactataacagtcataatgtttacataatggcggataagcagaagaatggcatcaaggtaaactttaaaatccgtcataacattgaagacggcagtgtgcagttggcggaccattaccagcaaaacacacccataggagacggtcccgttctgttgccggacaaccactacctaagtacgcaatcagccctgtcaaaagatcccaacgagaaacgtgatcacatggtccttctagaatttgtcaccgccgccgggataacccttggcatggacgagctttataagcgctcccgcgacatcagccacggctttcctcccgccgtggccgcgcaggacgacgggaccctgcccatgagctgtgctcaagagtccggcatggacaggcatcccgccgcctgtgcgtctgcgcgtataaacgtgtag

SEQ ID NO: 1113 - DNA, 855 bp, Artificial Sequence
  Modified Open Reading Frame
atggtttcgaagggagaggagcttttcacaggggtggttccgatactggtagagttggacggcgacgtgaacgggcacaagttttctgtgagtggtgagggtgaaggtgacgccacatacggcaagctgacgttaaaattcatatgtacgacgggtaagttaccggtgccatggccgacgctggtcaccactctgacctatggggtccagtgcttctctcggtatccggaccatatgaaacagcatgacttctttaagagtgctatgcctgaaggttatgtccaggagcgtaccatcttctttaaagacgatggtaactacaaaacgagggccgaggtgaagttcgaaggcgacaccttggtcaatcgtattgagttgaagggcatcgactttaaagaagatggtaacattcttggacataagcttgagtataactataacagtcataatgtttacataatggcggataagcagaagaatggcatcaaggtaaactttaaaatccgtcataacattgaagacggcagtgtgcagttggcggaccattaccagcaaaacacacccataggagacggtcccgttctgttgccggacaaccactacctaagtacgcaatcagccctgtcaaaagatcccaacgaaaaacgtgatcacatggtccttctagaatttgtcaccgccgccgggataacccttggcatggacgagctttataagcgctcccgcgacatcagccacggctttcctcccgccgtggccgcccaagacgacgggaccctgcccatgagctgcgcccaggagtccggcatggacagacaccccgccgcctgtgccagcgccaggatcaacgtgtaa

SEQ ID NO: 1114 - DNA, 855 bp, Artificial Sequence
  Modified Open Reading Frame
atggtttcgaagggagaggagcttttcacaggggtggttccgatactggtagagttggacggcgacgtgaacgggcacaagttttctgtgagtggtgagggtgaaggtgacgccacatacggcaagctgacgttaaaattcatatgtacgacgggtaagttaccggtgccatggccgacgctggtcaccactctgacctatggggtccagtgcttctctcggtatccggaccatatgaaacagcatgacttctttaagagtgctatgcctgaaggttatgtccaggagcgtaccatcttctttaaagacgatggtaactacaaaacgagggccgaggtgaagttcgaaggcgacaccttggtcaatcgtattgagttgaagggcatcgactttaaagaagatggtaacattcttggacataagcttgagtataactataacagtcataatgtttacataatggcggataagcagaagaatggcatcaaggtaaactttaaaatccgtcataacattgaagacggcagtgtgcagttggcggaccattaccagcaaaacacacccataggagacggtcccgttctgttgccggacaaccactacctaagtacgcaatcagccctgtcaaaagatcccaacgaaaaacgtgatcacatggtccttctagaatttgtcaccgccgccgggataacccttggcatggacgagctttataagagatcccgcgacatcagccacggctttcctcccgccgtggccgcccaagacgacgggaccctgcccatgagctgcgcccaggagtccggcatggacagacaccccgccgcctgtgccagcgccaggatcaacgtgtaa

SEQ ID NO: 1115 - DNA, 855 bp, Artificial Sequence
  Modified Open Reading Frame
atggtgtccaagggcgaggagctgttcaccggcgtcgtgcctatcctggtggagctggacggcgacgtgaacggccacaagtttagcgtgtccggcgagggcgaaggcgacgccacctacggcaagctgaccctgaagttcatctgcaccaccggcaaactgcccgtgccctggcccaccctcgtgaccaccctgacctacggagtccagtgcttcagcagataccccgaccacatgaagcagcacgacttcttcaagtccgccatgccggaaggctacgtccaggaaagaaccatcttctttaaggacgacggaaactataagaccagagccgaagtgaagttcgagggagacaccctggtgaacagaatcgagctgaagggcatcgacttcaaagaggacgggaacatcctgggccacaaactggagtacaactacaacagccacaacgtgtacatcatggccgacaaacagaagaacgggatcaaggtgaactttaagatcagacacaacatcgaagacggcagcgtgcagctcgccgaccactaccagcagaacacacccatcggcgacggacccgtgctgctgcccgacaaccattacctgagcacccagagcgccctgtccaaggaccctaacgagaagagagatcacatggtgctgctcgagttcgtgaccgccgccggcatcaccctggggatggacgagctgtacaagagatcccgcgacatcagccacggctttcctcccgccgtggccgcccaagacgacgggaccctgcccatgagctgcgcccaggagtccggcatggacagacacccagccgcctgtgccagcgccaggatcaacgtgtaa

SEQ ID NO: 1116 - DNA, 855 bp, Artificial Sequence
  Modified Open Reading Frame
atggtgtccaagggcgaggagctgttcaccggcgtggtgcctatcctggtggagctggacggcgacgtgaacggccacaagtttagcgtgtccggcgagggcgaaggcgacgccacctacggcaagctgaccctgaagttcatctgcaccaccggcaaactgcccgtgccctggcccaccctcgtgaccaccctgacctacggagtccagtgcttcagcagataccccgaccacatgaagcagcacgacttcttcaagtccgccatgcccgagggctacgtgcaggaaagaaccatcttctttaaggacgacggaaactataagaccagagccgaagtgaagttcgagggagacaccctggtgaacagaatcgagctgaagggcatcgacttcaaagaggacggcaacatcctgggccacaaactggagtacaactacaacagccacaacgtgtacatcatggccgacaaacagaagaacgggatcaaggtgaactttaagatcagacacaacatcgaagacggcagcgtgcagctcgccgaccactaccagcagaacacacccatcggcgacggacccgtgctgctgcccgacaaccattacctgagcacccagagcgccctgtccaaggaccctaacgagaagagagatcacatggtgctgctcgagttcgtgaccgccgccggcatcaccctgggcatggacgagctgtacaagagatcccgcgacatcagccacggctttcctcccgccgtggccgcccaagacgacgggaccctgcccatgagctgcgcccaggagtccggcatggacagacaccccgccgcctgtgccagcgccaggatcaacgtgtaa

SEQ ID NO: 1117 - DNA, 855 bp, Artificial Sequence
  Modified Open Reading Frame
atggtgtcgaagggcgaggagctgttcaccggtgtggtgcctatcctggtggagctggacggcgacgtgaacggccacaagttctctgtgtctggcgaaggcgagggtgacgccacgtacgggaagcttaccttgaagttcatctgcaccacaggtaagcttcccgtgccgtggcccaccctcgttaccaccttgacctacggcgtgcagtgcttctctcggtaccccgaccacatgaagcagcacgacttcttcaagtctgccatgcccgagggctacgtccaggagcgtaccatcttctttaaggacgacggcaactacaagacccgtgccgaggtcaagttcgagggtgacaccctcgtgaaccggatcgagctgaagggcatcgacttcaaggaggatggtaacatcctgggccacaagctggagtacaactacaactctcacaatgtgtatatcatggcagacaagcagaagaacggcatcaaggtgaactttaagatccgccacaacatcgaggacggctctgttcagctcgccgaccactaccagcagaacacccccatcggtgacggccccgtgctgcttcccgacaaccactacctgtcgactcagtctgccctgtctaaggaccccaatgagaagcgggatcatatggtcctactggagttcgtcacagccgcagggatcaccctcggcatggacgagctgtacaagagatcccgcgacatcagccacggctttcctcccgccgtggccgcccaagacgacgggaccctgcccatgagctgcgcccaggagtccggcatggacagacaccccgccgcctgtgccagcgccaggatcaacgtgtaa

SEQ ID NO: 1118 - DNA, 855 bp, Artificial Sequence
  Modified Open Reading Frame
atggtgtctaagggcgaggagctgttcaccggcgtggtgccaatcctggtggagctggacggagacgtgaacggccacaaattctctgtgtctggcgagggcgagggcgacgccacctacggcaagctgaccctgaagttcatctgcaccaccggcaagctgcccgtgccctggcccaccctggtgaccaccctgacctacggcgtgcagtgcttctctcgatatcccgaccacatgaagcagcacgacttcttcaagtctgccatgcccgagggctacgtgcaggagaggacaatcttcttcaaggacgacggcaattataagacccgggccgaggtgaagttcgagggggataccctggtgaaccggatcgagctgaaaggcatcgacttcaaggaggacggcaacatcctgggccacaaactggagtataattataactctcataacgtgtatatcatggccgacaagcagaagaacggcataaaggtgaacttcaagatccgccacaatattgaggacggctctgtgcagctggccgaccattaccagcagaacacccccatcggcgacggcccagtgctgctgcccgacaaccactacctctctacccagtctgccttgtctaaggaccccaatgagaagcgggaccacatggtcctgctggagttcgtgaccgccgccggcatcaccctgggcatggacgagctgtacaagagatcccgcgacatcagccacggctttcctcccgccgtggccgcccaagacgacgggaccctgcccatgagctgcgcccaggagtccggcatggacagacaccccgccgcctgtgccagcgccaggatcaacgtgtaa

SEQ ID NO: 1119 - DNA, 855 bp, Artificial Sequence
  Modified Open Reading Frame
atggtgtctaagggcgaggagctgttcaccggcgtggtgccaatcctggtggagctggacggagacgtgaacggccacaaattctctgtgtctggcgagggcgagggcgacgccacctacggcaagctgaccctgaagttcatctgcaccaccggcaagctgcccgtgccctggcccaccctggtgaccaccctgacctacggcgtgcagtgcttctctcgatatcccgaccacatgaagcagcacgacttcttcaagtctgccatgcccgagggctacgtgcaggagaggaccatcttcttcaaggacgacggcaactacaagacccgggccgaggtgaagttcgagggcgacaccctggtgaaccggatcgagctgaaaggcatcgacttcaaggaggacggcaacatcctgggccacaaactggagtataattataactctcataacgtgtatatcatggccgacaagcagaagaacggcatcaaggtgaacttcaagatccgccacaacattgaggacggctctgtgcagctggccgaccattaccagcagaacacccccatcggcgacggcccagtgctgctgcccgacaaccactacctctctacccagtctgccttgtctaaggaccccaacgagaagcgggaccacatggtcctgctggagttcgtgaccgccgccggcatcaccctgggcatggacgagctgtacaagagatcccgcgacatcagccacggctttcctcccgccgtggccgcccaagacgacgggaccctgcccatgagctgcgcccaggagtccggcatggacagacaccccgccgcctgtgccagcgccaggatcaacgtgtaa

SEQ ID NO: 1120 - DNA, 855 bp, Artificial Sequence
  Modified Open Reading Frame
atggtgtctaaaggggaggagctgttcacaggcgtggtgccaatcctggtagagctggacggagatgtaaacggccataagttctctgtctctggcgaaggcgagggcgacgcgacctacgggaagctgaccctaaagttcatctgcaccaccggaaagctgccagtgccctggcccacgctggtgaccaccctaacctacggcgtgcagtgcttctcaaggtaccccgaccacatgaagcagcacgactttttcaagtccgccatgcccgaggggtacgtgcaggagcggaccatcttcttcaaggacgacggcaactacaagacccgagccgaggtgaagttcgaaggggacaccctggtgaaccggatcgagttgaagggcatcgacttcaaagaggacgggaacatcctgggccacaaactggagtacaactacaactctcacaacgtgtacataatggccgacaaacaaaagaacggcatcaaggtgaacttcaagatccggcacaacatagaggacggctctgtgcagctggcagaccactaccagcagaacacaccgatcggcgacgggcccgtactactgcccgacaatcattatttgtcgacgcagtctgccctgtctaaggacccgaacgagaagcgggaccacatggtgctgctcgagttcgtgaccgccgccggcataaccctgggcatggacgagctgtacaagagatcccgcgacatcagccacggctttcctcccgccgtggccgcccaagacgacgggaccctgcccatgagctgcgcccaggagtccggcatggacagacaccccgccgcctgtgccagcgccaggatcaacgtgtaa

SEQ ID NO: 1121 - DNA, 855 bp, Artificial Sequence
  Modified Open Reading Frame
atggtgtctaaaggggaggagctgttcacaggcgtggtgccaatcctggtagagctggacggagatgtaaacggccataagttctctgtctctggcgagggcgagggcgacgcgacctacgggaagctgaccctgaagttcatctgcaccaccggaaagctgccagtgccctggcccacgctggtgacgaccctaacctacggcgtgcagtgcttctcaaggtaccccgaccacatgaagcagcacgactttttcaagtccgccatgcccgagggatacgtgcaggagcggaccatcttcttcaaggacgacggcaactacaagacccgagccgaggtgaagttcgaaggggacaccctggtgaaccggatcgagctgaagggcatcgacttcaaggaggacgggaacatcctgggccacaaactggagtacaactacaactctcacaacgtgtacataatggccgacaagcaaaagaacggcatcaaggtgaacttcaagatccggcacaacatagaggacggctctgtgcagctggcagaccactaccagcagaacacccccatcggcgacgggcccgtactactgcccgacaatcattatttgtcgacgcagtctgccctgtctaaggacccgaacgagaagcgggaccacatggtgctgctcgagttcgtgaccgccgccggcataaccctgggcatggacgagctgtacaagagatcccgcgacatcagccacggctttcctcccgccgtggccgcccaagacgacgggaccctgcccatgagctgcgcccaggagtccggcatggacagacaccccgccgcctgtgccagcgccaggatcaacgtgtaa

SEQ ID NO: 1122 - DNA, 855 bp, Artificial Sequence
  Modified Open Reading Frame
atggtgtctaaaggcgaggagctgttcaccggcgtggtgcccatactggtggagctggacggcgacgtgaacggccacaagttctctgtgtcaggcgagggcgagggcgacgccacatatggcaagctgaccctgaagttcatctgcacgaccggcaaactccccgtgccctggcccaccctggtgaccaccctgacctacggcgtgcagtgcttcagtcggtaccccgaccacatgaagcagcacgacttcttcaagtctgccatgcccgagggctacgtgcaggagcggaccatcttctttaaggacgacggcaattacaagacccgggccgaggtgaagttcgagggcgacaccctggtaaaccggatcgagctcaagggcatcgacttcaaggaggacggcaacatcctgggccacaagctggagtacaactacaactctcacaacgtgtatatcatggcagacaagcagaagaacggcatcaaggtgaacttcaaaatccgacacaacatcgaggacggctctgtgcaactggccgaccactaccagcagaatacacccatcggcgacggcccagtgctcctgcccgacaaccactacctgtctacgcagtctgccctgtctaaggaccccaacgagaagcgggaccacatggtgctgctggaattcgtgaccgccgccggcatcaccctgggcatggacgagctgtacaagagatcccgcgacatcagccacggctttcctcccgccgtggccgcccaagacgacgggaccctgcccatgagctgcgcccaggagtccggcatggacagacaccccgccgcctgtgccagcgccaggatcaacgtgtaa

SEQ ID NO: 1123 - DNA, 855 bp, Artificial Sequence
  Modified Open Reading Frame
atggtgtctaagggcgaggagctgttcaccggcgtcgtgcccatcctggtggagctcgacggcgacgtgaacggccacaagttctctgtgtctggcgagggcgagggcgacgccacctacggcaaactgaccctgaagttcatctgcaccaccggcaagttgcccgtgccctggcccaccctggtgaccaccctaacatacggcgtgcagtgcttctctcggtacccagaccacatgaagcagcacgacttcttcaagtctgccatgcccgagggctacgtgcaggagcggaccatcttcttcaaggacgacggcaactataagaccagggccgaggtgaagttcgagggcgacacactcgtgaaccggatcgagctgaagggcatcgatttcaaagaggacggcaacatactgggccataagctggagtacaactataactcacataatgtgtatatcatggccgataagcaaaagaacggcatcaaagtgaacttcaagatacggcacaacatcgaggacggctcagtgcagctggccgaccactaccagcagaacacgcccatcggcgatggccccgtgctgctgcccgacaaccactacttgtctacccagtctgccctgtctaaggaccccaacgagaagcgggaccacatggtgctgctggagttcgtgaccgccgccggcatcaccctgggcatggacgagctgtacaagagatcccgcgacatcagccacggctttcctcccgccgtggccgcccaagacgacgggaccctgcccatgagctgcgcccaggagtccggcatggacagacaccccgccgcctgtgccagcgccaggatcaacgtgtaa

SEQ ID NO: 1124 - DNA, 855 bp, Artificial Sequence
  Modified Open Reading Frame
atggtgtctaagggcgaggagctgttcaccggcgtcgtgcccatcctggtggagctcgacggcgacgtgaacggccacaagttctctgtgtctggcgagggcgagggcgacgccacctacggcaaactgaccctgaagttcatctgcaccaccggcaagttgcccgtgccctggcccaccctggtgaccaccctaacatacggcgtgcagtgcttctctcggtacccagaccacatgaagcagcacgacttcttcaagtctgccatgcccgagggctacgtgcaggagcggaccatcttcttcaaggacgacggcaactataagaccagggccgaggtgaagttcgagggcgacaccctcgtgaaccggatcgagctgaagggcatcgatttcaaagaggacggcaacatactgggccataagctggagtacaactacaactctcataatgtgtatatcatggccgacaagcaaaaaaatggcatcaaagtgaacttcaagatccggcacaacatcgaggacggctctgtgcagctggccgaccactaccagcagaacacgcccatcggcgatggccccgtgctgctgcccgacaaccactacctgtctacccagtctgccctgtctaaggaccccaacgagaagcgggaccacatggtgctgctggagttcgtgaccgccgccggcatcaccctgggcatggacgagctgtacaagagatcccgcgacatcagccacggctttcctcccgccgtggccgcccaagacgacgggaccctgcccatgagctgcgcccaggagtccggcatggacagacaccccgccgcctgtgccagcgccaggatcaacgtgtaa

SEQ ID NO: 1125 - DNA, 855 bp, Artificial Sequence
  Modified Open Reading Frame
atggtgtctaagggcgaggagctgttcaccggcgtcgtgcccatcctggtggagctcgacggcgacgtgaacggccacaagttctctgtgtctggcgagggcgagggcgacgccacctacggcaagctgaccctgaagttcatctgcaccaccggcaagctgcccgtgccctggcccaccctggtgaccaccctaacatacggcgtgcagtgcttctctcggtacccagaccacatgaagcagcacgacttcttcaagtctgccatgcccgagggctacgtgcaggagcggaccatcttcttcaaggacgacggcaactataagacccgggccgaggtgaagttcgagggcgacaccctcgtgaaccggatcgagctgaagggcatcgacttcaaggaggacggcaacatactgggccataagctggagtacaactacaactctcataatgtgtatatcatggccgacaagcaaaaaaatggcatcaaagtgaacttcaagatccggcacaacatcgaggacggctctgtgcagctggccgaccactaccagcagaacacgcccatcggcgatggccccgtgctgctgcccgacaaccactacctgtctacccagtctgccctgtctaaggaccccaacgagaagcgggaccacatggtgctgctggagttcgtgaccgccgccggcatcaccctgggcatggacgagctgtacaagagatcccgcgacatcagccacggctttcctcccgccgtggccgcccaagacgacgggaccctgcccatgagctgcgcccaggagtccggcatggacagacaccccgccgcctgtgccagcgccaggatcaacgtgtaa

SEQ ID NO: 1126 - DNA, 855 bp, Artificial Sequence
  Modified Open Reading Frame
atggtgtccaagggcgaggagctcttcaccggcgtggtgcctatactggtggagctggacggcgacgtgaacggccacaagtttagcgtgtccggagagggcgagggcgacgccacctatggcaagctgaccttgaagttcatctgcactaccggcaaactgccagtgccgtggcccacgttggttaccaccctgacctacggagtccagtgcttcagcagataccccgaccacatgaagcagcacgacttcttcaagtctgccatgcccgagggctacgtccaggaaagaaccatcttctttaaggacgatggcaactataagactcgtgccgaggtgaagttcgagggtgacaccctggtgaacaggatcgagctgaagggcattgacttcaaagaggatggtaacatactgggccacaaactggagtacaactacaacagtcataacgtgtacatcatggccgataaacagaagaacgggatcaaggtgaactttaagatcagacataatatcgaggacggcagcgtgcagctcgccgaccactaccagcagaacacacccatcggcgacggacccgtgctgctgcccgataatcattacctgtcgacccagtccgccctctccaaggaccctaacgagaagagagatcacatggtgctgctcgagttcgtgaccgccgccggcatcaccttgggcatggacgagctgtacaagagatcccgcgacatcagccacggctttcctcccgccgtggccgcccaagacgacgggaccctgcccatgagctgcgcgcaggagtccggcatggatagacatcctgccgcctgtgccagcgccaggatcaacgtgtaa

SEQ ID NO: 1127 - DNA, 855 bp, Artificial Sequence; identical to SEQ ID NO: 15
  Modified Open Reading Frame

SEQ ID NO: 1128 - DNA, 855 bp, Artificial Sequence
  Modified Open Reading Frame
atggtgtccaagggcgaggagctgttcaccggcgtggtgcctatcctggtggagctggacggcgacgtgaacggccacaagtttagcgtgtccggcgagggcgaaggcgacgccacctacggcaagctgaccctgaagttcatctgcaccaccggcaaactgcccgtgccctggcccaccctcgtgaccaccctgacctacggagtccagtgcttcagcagataccccgaccacatgaagcagcacgacttcttcaagtccgccatgcccgagggctacgtgcaggaaagaaccatcttctttaaggacgacggaaactataagaccagagccgaggtgaagttcgagggagacaccctggtgaacagaatcgagctgaagggcatcgacttcaaagaggacggcaacatcctgggccacaaactggagtacaactacaacagccacaacgtgtacatcatggccgacaaacagaagaacgggatcaaggtgaactttaagatcagacacaacatcgaagacggcagcgtgcagctcgccgaccactaccagcagaacacacccatcggcgacggacccgtgctgctgcccgacaaccattacctgagcacccagagcgccctgtccaaggaccctaacgagaagagagatcacatggtgctgctcgagttcgtgaccgccgccggcatcaccctgggcatggacgagctgtacaagagatcccgcgacatcagccacggctttcctcccgccgtggccgcccaagacgacgggaccctgcccatgagctgcgcccaggagtccggcatggacagacaccccgccgcctgtgccagcgccagaattaatgtataa

SEQ ID NO: 1129 - DNA, 855 bp, Artificial Sequence
  Modified Open Reading Frame
atggtgtccaagggcgaggagctgttcaccggcgtggtgcctatcctggtggagctggacggcgacgtgaacggccacaagtttagcgtgtccggcgagggcgaaggcgacgccacctacggcaagctgaccctgaagttcatctgcaccaccggcaaactgcccgtgccctggcccaccctcgtgaccaccctgacctacggagtccagtgcttcagcagataccccgaccacatgaagcagcacgacttcttcaagtccgccatgcccgagggctacgtgcaggaaagaaccatcttctttaaggacgacggaaactataagaccagagccgaggtgaagttcgagggagacaccctggtgaacagaatcgagctgaagggcatcgacttcaaagaggacggcaacatcctgggccacaaactggagtacaactacaacagccacaacgtgtacatcatggccgacaaacagaagaacgggatcaaggtgaactttaagatcagacacaacatcgaagacggcagcgtgcagctcgccgaccactaccagcagaacacacccatcggcgacggacccgtgctgctgcccgacaaccattacctgagcacccagagcgccctgtccaaggaccctaacgagaagagagatcacatggtgctgctcgagttcgtgaccgccgccggcatcaccctgggcatggacgagctgtacaagagatcccgcgacatcagccacggctttcctcccgccgtggccgcccaagacgacgggaccctgcccatgagctgcgcccaggagtccggcatggacagacaccccgccgcctgtgccagcgccaggattaatgtgtaa

SEQ ID NO: 1130 - DNA, 855 bp, Artificial Sequence
  Modified Open Reading Frame
atggtgtccaagggcgaggagctgttcaccggcgtggtgcctatcctggtggagctggacggcgacgtgaacggccacaagtttagcgtgtccggcgagggcgaaggcgacgccacctacggcaagctgaccctgaagttcatctgcaccaccggcaaactgcccgtgccctggcccaccctcgtgaccaccctgacctacggagtccagtgcttcagcagataccccgaccacatgaagcagcacgacttcttcaagtccgccatgcccgagggctacgtgcaggaaagaaccatcttctttaaggacgacggaaactataagaccagagccgaggtgaagttcgagggagacaccctggtgaacagaatcgagctgaagggcatcgacttcaaagaggacggcaacatcctgggccacaaactggagtacaactacaacagccacaacgtgtacatcatggccgacaaacagaagaacgggatcaaggtgaactttaagatcagacacaacatcgaagacggcagcgtgcagctcgccgaccactaccagcagaacacacccatcggcgacggacccgtgctgctgcccgacaaccattacctgagcacccagagcgccctgtccaaggaccctaacgagaagagagatcacatggtgctgctcgagttcgtgaccgccgccggcatcaccctgggcatggacgagctgtacaagagatcccgcgacatcagccacggctttcctcccgccgtggccgcccaagacgacgggaccctgcccatgagctgcgcccaggagtccggcatggacagacaccccgccgcctgtgccagcgccagaatcaacgtataa

SEQ ID NO: 1131 - DNA, 855 bp, Artificial Sequence
  Modified Open Reading Frame
atggtgtccaagggcgaggagctgttcaccggcgtggtgcctatcctggtggagctggacggcgacgtgaacggccacaagtttagcgtgtccggcgagggcgaaggcgacgccacctacggcaagctgaccctgaagttcatctgcaccaccggcaaactgcccgtgccctggcccaccctcgtgaccaccctgacctacggagtccagtgcttcagcagataccctgaccacatgaagcagcacgacttcttcaagtccgccatgccagagggctacgtgcaggaaagaaccatcttctttaaggacgacggaaactataagaccagagccgaggtgaagttcgagggagacaccctggtgaacagaatcgagctgaagggcatcgacttcaaagaggacggcaacatcctgggccacaaactggagtacaactacaacagccacaacgtgtacatcatggccgacaaacagaagaacgggatcaaggtgaactttaagatcagacacaacatcgaggacggcagcgtgcagctcgccgaccactaccagcagaacacacccatcggcgacggacccgtgctgctgcccgacaaccattacctgagcacccagagcgccctgtccaaggaccctaacgagaagagagatcacatggtgctgctcgagttcgtgaccgccgccggcatcaccctgggcatggacgagctgtacaagagatcccgcgacatcagccacggctttcctcccgccgtggccgcccaagacgacgggaccctgcccatgagctgcgcccaggagtccggcatggacagacaccccgccgcctgtgccagcgccaggatcaacgtgtaa

SEQ ID NO: 1132 - DNA, 855 bp, Artificial Sequence
  Modified Open Reading Frame
atggtgtccaagggcgaggagctgttcaccggcgtggtgcctatcctggtggagctggacggcgacgtgaacggccacaagtttagcgtgtccggcgagggcgaaggcgacgccacctacggcaagctgaccctgaagttcatctgcaccaccggcaaactgcccgtgccctggcccaccctcgtgaccaccctgacctacggagtccagtgcttcagcagataccctgaccacatgaagcagcacgacttcttcaagtccgccatgccagagggctacgtgcaggaaagaaccatcttctttaaggacgacggaaactataagaccagagccgaggtgaagttcgagggagacaccctggtgaacagaatcgagctgaagggcatcgacttcaaagaggacggcaacatcctgggccacaaactggagtacaactacaacagccacaacgtgtacatcatggccgacaaacagaagaacgggatcaaggtgaactttaagatcagacacaacatcgaagacggcagcgtgcagctcgccgatcactaccagcagaacacacccatcggcgacggacccgtgctgctgcccgacaaccattacctgagcacccagagcgccctgtccaaggaccctaacgagaagagagatcacatggtgctgctcgagttcgtgaccgccgccggcatcaccctgggcatggacgagctgtacaagagatcccgcgacatcagccacggctttcctcccgccgtggccgcccaagacgacgggaccctgcccatgagctgcgcccaggagtccggcatggacagacaccccgccgcctgtgccagcgccaggatcaacgtgtaa

SEQ ID NO: 1133 - DNA, 855 bp, Artificial Sequence
  Modified Open Reading Frame
atggtgtccaaaggagaggagctgttcaccggtgtggtgcctattctggtggagctggacggcgacgtgaacggacacaagttctcggtgtccggagagggagagggcgacgcaacgtacgggaagcttaccctgaaattcatctgtaccacgggtaagcttcctgtaccgtggccgaccttggtgaccactctgacttatggcgtgcagtgcttcagtcggtaccccgaccacatgaagcagcacgacttcttcaagtcggccatgcccgaagggtatgtccaagagcgtaccatcttctttaaagacgatggcaattacaagacccgggccgaggtgaagttcgagggcgacaccttggtgaaccggatcgagctgaagggcatcgactttaaggaagatggtaacattcttggacataagttggagtacaactacaactcacacaatgtgtatatcatggccgacaagcagaagaatggcatcaaggtcaacttcaagatccggcacaacatcgaggacgggtccgttcagctcgccgaccactaccagcagaatacacccatcggtgacggccctgtccttttgcccgacaaccattatttgtcgacgcagagtgcgttgtcaaaggatcctaacgagaagcgtgaccacatggtgcttctagagttcgtcactgccgcagggatcaccctcggcatggacgagctctacaagcggtcacgcgacatcagccatggctttcctccagccgtggctgctcaggatgacggcacgttgcctatgagctgcgcgcaggagtccggcatggatagacatcctgccgcctgcgccagcgctaggatcaacgtgtaa

SEQ ID NO: 1134 - DNA, 855 bp, Artificial Sequence
  Modified Open Reading Frame
atggtgtccaagggcgaggagctgttcaccggcgtggtgcctatcctggtggagctggacggcgacgtgaacggccacaagtttagcgtgtccggcgagggcgaaggcgacgccacctacggcaagctgaccctgaagttcatctgcaccaccggcaaactgcccgtgccctggcccaccctcgtgaccaccctgacctacggagtccagtgcttcagcagataccctgaccacatgaagcagcacgacttcttcaagtccgccatgccagagggctacgtgcaggaaagaaccatcttctttaaggacgacggaaactataagaccagagccgaggtgaagttcgagggagacaccctggtgaacagaatcgagctgaagggcatcgacttcaaagaggacggcaacatcctgggccacaaactggagtacaactacaacagccacaacgtgtacatcatggccgacaaacagaagaacgggatcaaggtgaactttaagatcagacacaacatcgaagacggcagcgtgcagctcgccgaccactaccagcagaacacaccgatcggcgacggacccgtgctgctgcccgacaaccattacctgagcacccagagcgccctgtccaaggaccctaacgagaagagagatcacatggtgctgctcgagttcgtgaccgccgccggcatcaccctgggcatggacgagctgtacaagagatcccgcgacatcagccacggctttcctcccgccgtggccgcccaagacgacgggaccctgcccatgagctgcgcccaggagtccggcatggacagacaccccgccgcctgtgccagcgccaggatcaacgtgtaa

SEQ ID NO: 1135 - DNA, 855 bp, Artificial Sequence
  Modified Open Reading Frame
atggtgtccaagggcgaggagctgttcaccggcgtggtgcctatcctggtggagctggacggcgacgtgaacggccacaagtttagcgtgtccggcgagggcgaaggcgacgccacctacggcaagctgaccctgaagttcatctgcaccaccggcaaactgcccgtgccctggcccaccctcgtgaccaccctgacctacggagtccagtgcttcagcagataccctgaccacatgaagcagcacgacttcttcaagtccgccatgccagagggctacgtgcaggaaagaaccatcttctttaaggacgacggaaactataagaccagagccgaggtgaagttcgagggagacaccctggtgaacagaatcgagctgaagggcatcgacttcaaagaggacggcaacatcctgggccacaaactggagtacaactacaacagccacaacgtgtacatcatggccgacaaacagaagaacgggatcaaggtgaactttaagatcagacacaacatcgaagacggcagcgtgcagctcgccgaccactaccagcagaacacacccatcggcgacggacccgtgctgctgcccgacaaccattacctgagcacccagagcgccctgtccaaggaccctaacgagaagagagatcacatggtgctgctcgagttcgttaccgccgccggcatcaccctgggcatggacgagctgtacaagagatcccgcgacatcagccacggctttcctcccgccgtggccgcccaagacgacgggaccctgcccatgagctgcgcccaggagtccggcatggacagacaccccgccgcctgtgccagcgccaggatcaacgtgtaa

SEQ ID NO: 1136 - DNA, 855 bp, Artificial Sequence
  Modified Open Reading Frame
atggtgtccaagggcgaggagctgttcaccggcgtggtgcctatcctggtggagctggacggcgacgtgaacggccacaagtttagcgtgtccggcgagggcgaaggcgacgccacctacggcaagctgaccctgaagttcatctgcaccaccggcaaactgcccgtgccctggcccaccctcgtgaccaccctgacctacggggtccagtgcttcagcagataccccgaccacatgaagcagcacgacttcttcaagtcggccatgcccgagggctacgtgcaggaaagaaccatcttctttaaggacgacggaaactataagaccagagccgaggtgaagttcgagggagacaccctggtgaacagaatcgagctgaagggcatcgacttcaaagaggacggcaacatcctgggccacaaactggagtacaactacaacagccacaacgtgtacatcatggccgacaaacagaagaacgggatcaaggtgaactttaagatcagacacaacatcgaagacggcagcgtgcagctcgccgaccactaccagcagaacacacccatcggcgacggacccgtgctgctgcccgacaaccattacctgagcacccagagcgccctgtccaaggaccctaacgagaagagagatcacatggtgctgctcgagttcgtgaccgccgccggcatcaccctgggcatggacgagctgtacaagaggtcccgcgacatcagccacggctttcctcccgccgtggccgcccaagacgacgggaccctgcccatgagctgcgcccaggagtccggcatggacaggcaccccgccgcctgtgccagcgccaggatcaacgtgtaa

SEQ ID NO: 1137 - DNA, 855 bp, Artificial Sequence
  Modified Open Reading Frame
atggtgtccaagggggaggagctgttcaccggcgtggtgcctatcctggtggagctggacggcgacgtgaacggccacaagtttagcgtgtccggcgagggcgaaggcgacgccacctacggcaagctgaccctgaagttcatctgcaccaccggcaaactgcccgtgccctggcccaccctcgtgaccaccctgacctacggagtccagtgcttcagcagataccctgaccacatgaagcagcacgacttcttcaagtccgccatgccagagggctacgtgcaggaaagaaccatcttctttaaggacgacggaaactataagaccagagccgaggtgaagttcgagggagacaccctggtgaacagaatcgagctgaagggcatcgacttcaaagaggacggcaacatcctgggccacaaactggagtacaactacaacagccacaacgtgtacatcatggccgacaaacagaagaacgggatcaaggtgaactttaagatcagacacaacatcgaagacggcagcgtgcagctcgccgaccactaccagcagaacacacccatcggcgacggacccgtgctgctgcccgacaaccattacctgagcacccagagcgccctgtccaaggaccctaacgagaagagagatcacatggtgctgctcgagttcgtgaccgccgccggcatcaccctgggcatggacgagctgtacaagagatcccgcgacatcagccacggctttcctcccgccgtggccgcccaagacgacgggaccctgcccatgagctgcgcccaggagtccggcatggacagacaccccgccgcctgtgccagcgccaggatcaacgtgtaa

SEQ ID NO: 1138 - DNA, 855 bp, Artificial Sequence
  Modified Open Reading Frame
atggtgtccaagggcgaggagctgttcaccggcgtggtgcctatcctggtggagctggacggcgacgtgaacggccacaagtttagcgtgtccggcgagggcgaaggcgacgccacctacggcaagctgaccctgaagttcatctgcaccaccggcaaactgcccgtgccctggcccaccctcgtgaccaccctgacctacggagtccagtgcttcagcagataccctgaccacatgaagcagcacgacttcttcaagtccgccatgccagagggctacgtgcaggaaagaaccatcttctttaaggacgacggaaactataagaccagagccgaggtgaagttcgagggagacaccctggtgaacagaatcgagctgaagggcatcgacttcaaagaggacggcaacatcctgggccacaaactggagtacaactacaacagccacaacgtgtacatcatggccgacaaacagaagaacgggatcaaggtgaactttaagatcagacacaacatcgaagacggcagcgtgcagctcgccgaccactaccagcagaacacacccatcggcgacggacccgtgctgctgcccgacaaccattacctgagcacccagagcgccctgtccaaggaccctaacgagaagagagatcacatggtgctgctcgagttcgtgaccgccgccggcatcaccctgggcatggacgagctgtacaagagatcccgcgacatcagccacggctttcctcccgcggtggccgcccaagacgacgggaccctgcccatgagctgcgcccaggagtccggcatggacagacaccccgccgcctgtgccagcgccaggatcaacgtgtaa

SEQ ID NO: 1139 - DNA, 855 bp, Artificial Sequence
  Modified Open Reading Frame
atggtgtccaagggcgaggagctgttcaccggcgtggtgcctatcctggtggagctggacggcgacgtgaacggccacaagtttagcgtgtccggcgagggcgaaggcgacgccacctacggcaagctgaccctgaagttcatctgcaccaccggcaaactgcccgtgccctggcccaccctcgtgaccaccctgacctacggagtccagtgcttcagcagataccctgaccacatgaagcagcacgacttcttcaagtccgccatgccagagggctacgtgcaggaaagaaccatcttctttaaggacgacggaaactataagaccagagccgaggtgaagttcgagggagacaccctggtgaacagaatcgagctgaagggcatcgacttcaaagaggacggcaacatcctgggccacaaactggagtacaactacaacagtcacaacgtgtacatcatggccgacaaacagaagaacgggatcaaggtgaactttaagatcagacacaacatcgaagacggcagcgtgcagctcgccgaccactaccagcagaacacacccatcggcgacggacccgtgctgctgcccgacaaccattacctgagcacccagagcgccctgtccaaggaccctaacgagaagagagatcacatggtgctgctcgagttcgtgaccgccgccggcatcaccctgggcatggacgagctgtacaagagatcccgcgacatcagccacggctttcctcccgccgtggccgcccaagacgacgggaccctgcccatgagctgcgcccaggagtccggcatggacagacaccccgccgcctgtgccagcgccaggatcaacgtgtaa

SEQ ID NO: 1140 - DNA, 855 bp, Artificial Sequence
  Modified Open Reading Frame
atggtgtccaagggcgaggagctgttcaccggcgtggtgcctatcctggtggagctggacggcgacgtgaacggccacaagtttagcgtgtccggcgagggcgaaggcgacgccacctacggcaagctgaccctgaagttcatctgcaccaccggcaaactgcccgtgccctggcccaccctcgtgaccaccctgacctacggagtccagtgcttcagcagataccccgaccacatgaagcagcacgacttcttcaagtccgccatgccagagggctacgtgcaggaaagaaccatcttctttaaggacgacggaaactataagaccagagccgaggtgaagttcgagggagacaccctggtgaacagaatcgagctgaagggcatcgacttcaaagaggacggcaacatcctgggccacaaactggagtacaactacaacagtcacaacgtgtacatcatggccgacaaacagaagaacgggatcaaggtgaactttaagatcagacacaacatcgaagacggcagcgtgcagctcgccgaccactaccagcagaacacacccatcggcgacggacccgtgctgctgcccgacaaccattacctgagcacccagagcgccctgtccaaggaccctaacgagaagagagatcacatggtgctgctcgagttcgtgaccgccgccggcatcaccctgggcatggacgagctgtacaagagatcccgcgacatcagccacggctttcctcccgccgtggccgcccaagacgacgggaccctgcccatgagctgcgcccaggagtccggcatggacagacaccccgccgcctgtgccagcgccaggatcaacgtgtaa

SEQ ID NO: 1141 - DNA, 855 bp, Artificial Sequence
  Modified Open Reading Frame
atggtgtccaagggcgaggagctgttcaccggcgtggtgcctatcctggtggagctggacggcgacgtgaacggccacaagtttagcgtgtccggcgagggcgaaggcgacgccacctacggcaagctgaccctgaagttcatctgcaccaccggcaaactgcccgtgccctggcccaccctcgtgaccaccctgacctacggagtccagtgcttcagcaggtaccccgaccacatgaagcagcacgacttcttcaagtccgccatgccagagggctacgtgcaggaaagaaccatcttctttaaggacgacggaaactataagaccagagccgaggtgaagttcgagggagacaccctggtgaacagaatcgagctgaagggcatcgacttcaaagaggacggcaacatcctgggccacaaactggagtacaactacaacagccacaacgtgtacatcatggccgacaaacagaagaacgggatcaaggtgaactttaagatcagacacaacatcgaagacggcagcgtgcagctcgccgaccactaccagcagaacacacccatcggcgacggacccgtgctgctgcccgacaaccattacctgagcacccagagcgccctgtccaaggaccctaacgagaagagagatcacatggtgctgctcgagttcgtgaccgccgccggcatcaccctgggcatggacgagctgtacaagagatcccgcgacatcagccacggctttcctcccgccgtggccgcccaagacgacgggaccctgcccatgagctgcgcccaggagtccggcatggacagacaccccgccgcctgtgccagcgccaggatcaacgtgtaa

SEQ ID NO: 1142 - DNA, 855 bp, Artificial Sequence
  Modified Open Reading Frame
atggtgtccaagggcgaggagctgttcaccggcgtggtgcctatcctggtggagctggacggcgacgtgaacggccacaagtttagcgtgtccggcgagggcgaaggcgacgccacctacggcaagctgaccctgaagttcatctgcaccaccggcaaactgcccgtgccctggcccaccctcgtgaccaccctgacctacggagtccagtgcttcagcagataccctgaccacatgaagcagcacgacttcttcaagtccgccatgccagagggctacgtgcaggaaagaaccatcttctttaaggacgacggaaactataagaccagagccgaggtgaagttcgagggagacaccctggtgaacagaatcgagctgaagggcatcgacttcaaagaggacggcaacatcctgggccacaaactggagtacaactacaacagccacaacgtgtacatcatggccgacaaacagaagaacgggatcaaggtgaactttaagatcagacacaacatcgaagacggcagcgtgcagctcgccgaccactaccagcagaacacacccatcggcgacggacccgtgctgctgcccgacaaccattacctgagcacccagagcgccctgtccaaggaccctaacgagaagagagatcacatggtgctgctcgagttcgtgaccgccgccggcatcaccctgggcatggacgagctgtacaagagatcccgcgacatcagccacggctttcctcccgccgtggccgcccaagacgacgggaccctgcccatgagctgcgcccaggagtccggcatggacagacaccccgccgcctgtgccagcgccaggatcaacgtgtaa

SEQ ID NO: 1143 - DNA, 855 bp, Artificial Sequence
  Modified Open Reading Frame
atggtatccaagggagaggagctgtttactggcgtggtccccattctagtcgagctggacggtgatgtgaacggtcacaagttttcggtgtcaggcgagggagagggggacgccacgtacgggaagttaacacttaagtttatctgcacgaccggaaaacttcctgtaccatggccaaccctagtaacgacgttgacttatggtgttcagtgcttctcgcggtatcctgaccatatgaaacaacacgacttctttaagagtgcgatgccggagggctatgtgcaggagcgcaccatctttttcaaggacgacgggaactataagacaagagctgaggtcaaatttgaaggagacactctagtaaatcgcatagaactcaagggtatagactttaaagaagacggtaatatcctaggacataaactggaatacaattacaactcgcacaacgtgtacatcatggcagacaagcagaagaacggcatcaaggtcaatttcaagattaggcataacatagaagacggaagtgtgcagcttgcagaccattaccagcagaacacccctattggagatgggcctgtattattacccgacaatcattacctatcgacgcagagcgcgctgtctaaagacccaaacgagaaacgtgatcatatggtactcctggaatttgttacggctgcgggtataacactgggaatggatgagctttataaaaggtcgagagacatctcgcatggatttcccccagctgtagccgcacaggatgacgggactcttcctatgagctgcgcgcaggaatccggtatggatcgtcatccagctgcgtgcgcgtcagctcgtataaatgtgtaa

SEQ ID NO: 1144 - DNA, 855 bp, Artificial Sequence
  Modified Open Reading Frame
atggtgagtaagggtgaagagttgtttactggtgtcgttcctatcctcgtggaactggacggtgatgttaatgggcataagttctctgttagcggcgagggagaaggggacgccacttatggtaagttaaccctaaaattcatatgtacgacaggcaaattaccggtaccgtggcccacgttggtgacgacgctgacgtacggagtgcagtgtttttctcgttatcctgatcatatgaaacagcatgatttctttaaatcggcaatgccggagggatatgtccaggagcgaacgatctttttcaaagacgacggtaactataaaacacgtgctgaagtcaaattcgagggtgacactttggtgaatcgcatcgagttaaagggcattgatttcaaggaagacgggaatatcctaggccataagttggaatacaactataactctcataacgtctatattatggccgataaacaaaagaatgggattaaggtaaactttaagatacggcacaatatcgaagacgggtctgttcaacttgccgatcactatcagcagaacacgccaatcggggacggcccggttctcttgccagacaatcattatttgtcgacacagagcgccctcagtaaagatcccaatgaaaaacgggatcacatggtgttattggaattcgtaactgcagccggtatcacactaggcatggacgaattatacaaaagaagccgcgacatcagccacgggttccctcccgcagtcgctgctcaggatgatgggactctccccatgtcgtgtgctcaagagagtgggatggatagacatccagctgcttgcgcttctgctcggattaatgtctaa

SEQ ID NO: 1145 - DNA, 855 bp, Artificial Sequence
  Modified Open Reading Frame
atggtttcaaagggggaagagctctttactggtgtggttcctatacttgtagaacttgacggagacgtgaacggtcataagtttagcgtctcgggagagggggaaggtgatgccacttacggaaagttaaccttaaagtttatttgcacaactggcaaactccctgttccctggccgacacttgtaaccactttgacgtatggggtccaatgcttcagcaggtatcccgaccatatgaaacaacatgactttttcaaaagcgctatgccggagggatacgtacaagaacgtacgattttctttaaagatgacgggaactacaaaacgcgggcagaagttaaattcgagggtgatacgctggtgaataggattgagttaaaagggatagatttcaaagaggatggcaacatcttgggccataaactcgaatataactacaattcccataatgtgtacataatggccgataaacaaaaaaacggcatcaaagtcaacttcaaaatccgacacaacattgaagatggttctgtacagctagcagaccactatcaacagaatactccgataggcgatggcccagtcctgctaccagacaaccattatctatcgactcaatccgcactctcgaaggacccgaatgaaaagagagaccatatggttctgctcgagtttgtcacggccgcagggatcacacttgggatggacgagctgtacaaacgcagtcgtgatatctcccacggctttcctccggcagtcgcagcgcaggatgacggaaccctaccgatgtcatgcgcacaagaaagcggaatggaccggcatcccgcagcttgcgcgtctgcccgtataaacgtgtaa

SEQ ID NO: 1146 - DNA, 855 bp, Artificial Sequence
  Modified Open Reading Frame
atggtgagtaagggcgaggagctgttcaccggtgtggtgccaatactggtggagctggacggcgacgtgaacggccacaagttctcggtgtctggcgagggcgagggcgacgccacttatggcaagctcaccctgaagttcatctgcaccacggggaagctgcccgtgccctggcccaccctggtgaccaccctgacctacggcgtgcagtgcttcagtcggtaccccgaccacatgaagcagcacgacttcttcaagtcggccatgcccgaggggtatgtgcaggagcggaccatcttctttaaagacgatggcaattataaaacccgtgccgaggtgaagttcgagggcgacaccttggtcaacaggattgaattaaaaggcatcgactttaaagaagatggcaacatcctgggccacaagttagagtacaactacaactctcacaatgtgtatatcatggccgacaagcagaagaacggcatcaaggtgaattttaagatcagacacaacatcgaggacggctctgttcagctcgccgaccactaccagcagaatacgcccatcggtgacggccccgtgcttttgcccgacaaccactacctgtctacccagtctgccctgtctaaggaccccaacgagaagcgggaccacatggtgctgctggagttcgtgaccgccgccggcatcacgctgggcatggacgagctgtacaagagatcccgcgacatcagccacggctttcctcccgccgtggccgcccaagacgacgggaccctgcccatgagctgcgcccaggagtccggcatggacagacaccccgccgcctgtgccagcgccaggatcaacgtgtaa

SEQ ID NO: 1147 - DNA, 855 bp, Artificial Sequence
  Modified Open Reading Frame
atggtgtctaagggcgaggagctgttcaccggtgtggtgccaatactggtggagctggacggcgacgtgaacggccacaagttctcggtgtctggcgagggcgagggcgacgccacttatggcaagctcaccctgaagttcatctgcaccacggggaagctgcccgtgccctggcccaccctggtgaccaccctgacctacggcgtgcagtgcttcagtcggtaccccgaccacatgaagcagcacgacttcttcaagtcggccatgcccgaggggtatgtgcaggagcggaccatcttctttaaagacgatggcaattataaaacccgtgccgaggtgaagttcgagggcgacaccttggtcaacaggattgaattaaaaggcatcgactttaaagaagatggcaacatcctgggccacaagttagagtacaactacaactctcacaatgtgtatatcatggccgacaagcagaagaacggcatcaaggtgaattttaagatcagacacaacatcgaggacggctctgttcagctcgccgaccactaccagcagaatacgcccatcggtgacggccccgtgcttttgcccgacaaccactacctgtctacccagtctgccctgtctaaggaccccaacgagaagcgggaccacatggtgctgctggagttcgtgaccgccgccggcatcacgctgggcatggacgagctgtacaagagatcccgcgacatcagccacggctttcctcccgccgtggccgcccaagacgacgggaccctgcccatgagctgcgcccaggagtccggcatggacagacaccccgccgcctgtgccagcgccaggatcaacgtgtaa

SEQ ID NO: 1148 - DNA, 855 bp, Artificial Sequence
  Modified Open Reading Frame
atggtgtctaagggcgaggagctgttcaccggtgtggtgccaatactggtggagctggacggcgacgtgaacggccacaagttctcggtgtctggcgagggcgagggcgacgccacttatggcaagctcaccctgaagttcatctgcaccacggggaagctgcccgtgccctggcccaccctggtgaccaccctgacctacggcgtgcagtgcttcagtcggtaccccgaccacatgaagcagcacgacttcttcaagtcggccatgcccgaggggtatgtgcaggagcggaccatcttctttaaagacgatggcaattataaaacccgtgccgaggtgaagttcgagggcgacaccttggtcaacaggattgaattaaaaggcatcgactttaaagaagatggcaacatcctgggccacaagttagagtacaactacaactctcacaatgtgtatatcatggccgacaagcagaagaacggcatcaaggtgaattttaagatcagacacaacatcgaggacggctctgttcagctcgccgaccactaccagcagaatacgcccatcggtgacggccccgtgctgctgcccgacaaccactacctgtctacccagtctgccctgtctaaggaccccaacgagaagcgggaccacatggtgctgctggagttcgtgaccgccgccggcatcacgctgggcatggacgagctgtacaagagatcccgcgacatcagccacggctttcctcccgccgtggccgcccaagacgacgggaccctgcccatgagctgcgcccaggagtccggcatggacagacaccccgccgcctgtgccagcgccaggatcaacgtgtaa

SEQ ID NO: 1149 - DNA, 855 bp, Artificial Sequence
  Modified Open Reading Frame
atggtgtccaagggcgaggagctgttcaccggtgtcgtccccatattggtggagctggacggcgatgtgaatggacacaagttttctgtgtcgggggagggcgagggcgacgcgacgtacgggaagcttaccctgaagttcatctgcactacgggtaagcttcctgtgccttggcctactttggtaactacactgacgtacggcgtgcagtgcttctcgcggtatcctgatcacatgaaacagcacgactttttcaaatcggcgatgcctgagggttatgtccaggaacgtaccatcttctttaaggacgatggcaattacaagacccgggccgaggtgaagttcgagggcgacaccttggtgaaccggatcgagctgaagggcatcgactttaaggaggatggtaacatcctgggccacaagttggaatacaactataactctcacaatgtctacatcatggcagacaagcagaagaatggtatcaaagtaaacttcaaaatccggcacaacattgaagacggttctgttcagctggcggaccactaccagcagaacacgccgattggggacggcccggtgctcctgcccgacaaccattacctgtcgactcaatctgcattgtccaaggatccaaacgagaagcgtgatcacatggttctgttggagtttgtgacggccgccggcatcacgctgggcatggacgagctgtacaaaagatcccgcgacatcagccacggctttcctcccgccgtggccgcccaagacgacgggaccctgcccatgagctgcgcccaggagtccggcatggacagacaccccgccgcctgtgccagcgccaggatcaacgtctaa

SEQ ID NO: 1150 - DNA, 855 bp, Artificial Sequence
  Modified Open Reading Frame
atggtgtctaagggcgaggagctgttcaccggcgtggtgccaatactggtggagctggacggcgacgtgaacggccacaagttctcggtgtctggcgagggcgagggcgacgccacttatggcaagctcaccctgaagttcatctgcaccacggggaagctgcccgtgccctggcccaccctggtgaccaccctgacctacggcgtgcagtgcttcagtcggtaccccgaccacatgaagcagcacgacttcttcaagtcggccatgcccgaggggtatgtgcaggagcggaccatcttctttaaagacgatggcaattataaaacccgtgccgaggtgaagttcgagggcgacaccttggtcaacaggattgaattaaaaggcatcgactttaaagaagatggcaacatcctgggccacaagttagagtacaactacaactctcacaatgtgtatatcatggccgacaagcagaagaacggcatcaaggtgaattttaagatcagacacaacatcgaggacggctctgttcagctcgccgaccactaccagcagaatacgcccatcggcgacggccccgtgctgctgcccgacaaccactacctgtctacccagtctgccctgtctaaggaccccaacgagaagcgggaccacatggtgctgctggagttcgtgaccgccgccggcatcacgctgggcatggacgagctgtacaagagatcccgcgacatcagccacggctttcctcccgccgtggccgcccaagacgacgggaccctgcccatgagctgcgcccaggagtccggcatggacagacaccccgccgcctgtgccagcgccaggatcaacgtgtaa

SEQ ID NO: 1151 - DNA, 855 bp, Artificial Sequence
  Modified Open Reading Frame
atggtgtctaagggcgaggagctgttcaccggcgtggtgcccatactggtggagctggacggcgacgtgaacggccacaagttctcggtgtctggcgagggcgagggcgacgccacttatggcaagctcaccctgaagttcatctgcaccacggggaagctgcccgtgccctggcccaccctggtgaccaccctgacctacggcgtgcagtgcttcagtcggtaccccgaccacatgaagcagcacgacttcttcaagtcggccatgcccgaggggtatgtgcaggagcggaccatcttctttaaagacgatggcaattataaaacccgtgccgaggtgaagttcgagggcgacaccttggtcaacaggattgaattaaaaggcatcgactttaaagaagatggcaacatcctgggccacaagttagagtacaactacaactctcacaatgtgtatatcatggccgacaagcagaagaacggcatcaaggtgaattttaagatcagacacaacatcgaggacggctctgttcagctcgccgaccactaccagcagaacacgcccatcggcgacggccccgtgctgctgcccgacaaccactacctgtctacccagtctgccctgtctaaggaccccaacgagaagcgggaccacatggtgctgctggagttcgtgaccgccgccggcatcacgctgggcatggacgagctgtacaagagatcccgcgacatcagccacggctttcctcccgccgtggccgcccaagacgacgggaccctgcccatgagctgcgcccaggagtccggcatggacagacaccccgccgcctgtgccagcgccaggatcaacgtgtaa

SEQ ID NO: 1152 - DNA, 855 bp, Artificial Sequence
  Modified Open Reading Frame
atggtgtctaagggcgaggagctgttcaccggcgtggtgcccatactggtggagctggacggcgacgtgaacggccacaagttctcggtgtctggcgagggcgagggcgacgccacttatggcaagctcaccctgaagttcatctgcaccaccgggaagctgcccgtgccctggcccaccctggtgaccaccctgacctacggcgtgcagtgcttcagtcggtaccccgaccacatgaagcagcacgacttcttcaagtcggccatgcccgaggggtatgtgcaggagcggaccatcttctttaaagacgatggcaattataaaacccgtgccgaggtgaagttcgagggcgacaccttggtcaacaggattgaattaaaaggcatcgactttaaagaagatggcaacatcctgggccacaagttagagtacaactacaactctcacaatgtgtatatcatggccgacaagcagaagaacggcatcaaggtgaacttcaagatccggcacaacatcgaggacggctctgttcagctggccgaccactaccagcagaacacgcccatcggcgacggccccgtgctgctgcccgacaaccactacctgtctacccagtctgccctgtctaaggaccccaacgagaagcgggaccacatggtgctgctggagttcgtgaccgccgccggcatcacgctgggcatggacgagctgtacaagagatcccgcgacatcagccacggctttcctcccgccgtggccgcccaagacgacgggaccctgcccatgagctgcgcccaggagtccggcatggacagacaccccgccgcctgtgccagcgccaggatcaacgtgtaa

SEQ ID NO: 1153 - DNA, 855 bp, Artificial Sequence
  Modified Open Reading Frame
atggtgtctaagggcgaggagctgttcaccggcgtggtgcccatactggtggagctggacggcgacgtgaacggccacaagttctctgtgtctggcgagggcgagggcgacgccacttatggcaagctcaccctgaagttcatctgcaccaccgggaagctgcccgtgccctggcccaccctggtgaccaccctgacctacggcgtgcagtgcttcagtcggtaccccgaccacatgaagcagcacgacttcttcaagtcggccatgcccgaggggtatgtgcaggagcggaccatcttctttaaagacgatggcaattataaaacccgtgccgaggtgaagttcgagggcgacaccttggtcaacaggattgaattaaaaggcatcgactttaaagaagatggcaacatcctgggccacaagttagagtacaactacaactctcacaatgtgtatatcatggccgacaagcagaagaacggcatcaaggtgaacttcaagatccggcacaacatcgaggacggctctgttcagctggccgaccactaccagcagaacacgcccatcggcgacggccccgtgctgctgcccgacaaccactacctgtctacccagtctgccctgtctaaggaccccaacgagaagcgggaccacatggtgctgctggagttcgtgaccgccgccggcatcacgctgggcatggacgagctgtacaagagatcccgcgacatcagccacggctttcctcccgccgtggccgcccaagacgacgggaccctgcccatgagctgcgcccaggagtccggcatggacagacaccccgccgcctgtgccagcgccaggatcaacgtgtaa

SEQ ID NO: 1154 - DNA, 855 bp, Artificial Sequence
  Modified Open Reading Frame
atggtgtctaagggcgaggagctgttcaccggcgtggtgcccatactggtggagctggacggcgacgtgaacggccacaagttctctgtgtctggcgagggcgagggcgacgccacttatggcaagctcaccctgaagttcatctgcaccaccgggaagctgcccgtgccctggcccaccctggtgaccaccctgacctacggcgtgcagtgcttcagtcggtaccccgaccacatgaagcagcacgacttcttcaagtcggccatgcccgaggggtatgtgcaggagcggaccatcttctttaaagacgatggcaattataaaacccgtgccgaggtgaagttcgagggcgacaccttggtcaacaggattgaattaaaaggcatcgactttaaagaagatggcaacatcctgggccacaagttagagtacaactacaactctcacaatgtgtatatcatggccgacaagcagaagaacggcatcaaggtgaacttcaagatccggcacaacatcgaggacggctctgtgcagctggccgaccactaccagcagaacacgcccatcggcgacggccccgtgctgctgcccgacaaccactacctgtctacccagtctgccctgtctaaggaccccaacgagaagcgggaccacatggtgctgctggagttcgtgaccgccgccggcatcacgctgggcatggacgagctgtacaagagatcccgcgacatcagccacggctttcctcccgccgtggccgcccaagacgacgggaccctgcccatgagctgcgcccaggagtccggcatggacagacaccccgccgcctgtgccagcgccaggatcaacgtgtaa

SEQ ID NO: 1155 - DNA, 855 bp, Artificial Sequence
  Modified Open Reading Frame
atggtgtctaagggcgaggagctgttcaccggcgtggtgcccatactggtggagctggacggcgacgtgaacggccacaagttctctgtgtctggcgagggcgagggcgacgccacctacggcaagctcaccctgaagttcatctgcaccaccgggaagctgcccgtgccctggcccaccctggtgaccaccctgacctacggcgtgcagtgcttcagtcggtaccccgaccacatgaagcagcacgacttcttcaagtcggccatgcccgaggggtatgtgcaggagcggaccatcttctttaaagacgatggcaattataaaacccgtgccgaggtgaagttcgagggcgacaccttggtcaacaggattgaattaaaaggcatcgactttaaagaagatggcaacatcctgggccacaagttagagtacaactacaactctcacaatgtgtatatcatggccgacaagcagaagaacggcatcaaggtgaacttcaagatccggcacaacatcgaggacggctctgtgcagctggccgaccactaccagcagaacacgcccatcggcgacggccccgtgctgctgcccgacaaccactacctgtctacccagtctgccctgtctaaggaccccaacgagaagcgggaccacatggtgctgctggagttcgtgaccgccgccggcatcacgctgggcatggacgagctgtacaagagatcccgcgacatcagccacggctttcctcccgccgtggccgcccaagacgacgggaccctgcccatgagctgcgcccaggagtccggcatggacagacaccccgccgcctgtgccagcgccaggatcaacgtgtaa

SEQ ID NO: 1156 - DNA, 855 bp, Artificial Sequence
  Modified Open Reading Frame
atggtgtctaagggcgaggagctgttcaccggcgtggtgcccatcctggtggagctggacggcgacgtgaacggccacaagttctctgtgtctggcgagggcgagggcgacgccacctacggcaagctcaccctgaagttcatctgcaccaccgggaagctgcccgtgccctggcccaccctggtgaccaccctgacctacggcgtgcagtgcttcagtcggtaccccgaccacatgaagcagcacgacttcttcaagtcggccatgcccgaggggtatgtgcaggagcggaccatcttctttaaagacgatggcaattataaaacccgtgccgaggtgaagttcgagggcgacaccttggtcaacaggattgaattaaaaggcatcgactttaaagaagatggcaacatcctgggccacaagttagagtacaactacaactctcacaatgtgtatatcatggccgacaagcagaagaacggcatcaaggtgaacttcaagatccggcacaacatcgaggacggctctgtgcagctggccgaccactaccagcagaacacccccatcggcgacggccccgtgctgctgcccgacaaccactacctgtctacccagtctgccctgtctaaggaccccaacgagaagcgggaccacatggtgctgctggagttcgtgaccgccgccggcatcacgctgggcatggacgagctgtacaagagatcccgcgacatcagccacggctttcctcccgccgtggccgcccaagacgacgggaccctgcccatgagctgcgcccaggagtccggcatggacagacaccccgccgcctgtgccagcgccaggatcaacgtgtaa

SEQ ID NO: 1157 - DNA, 855 bp, Artificial Sequence
  Modified Open Reading Frame
atggtgtccaagggcgaggagctgttcaccggcgtggtgcctatcctggtggagctggacggcgacgtgaacggccacaagtttagcgtgtccggcgagggcgaaggcgacgccacctacggcaagctgaccctgaagttcatctgcaccaccggcaaactgccggtgccctggcccaccctcgtgaccaccctgacctacggagtccagtgcttcagcagataccccgaccacatgaagcagcacgacttcttcaagtccgccatgcccgagggctacgtgcaggaaagaaccatcttctttaaggacgacggaaactataagaccagagccgaggtgaagttcgagggagacaccctggtgaacagaatcgagctgaagggcatcgacttcaaagaggacggcaacatcctgggccacaaactggagtacaactacaacagccacaacgtgtacatcatggccgacaaacagaagaacgggatcaaggtgaactttaagatcagacacaacatcgaagacggcagcgtgcagctcgccgaccactaccagcagaacacacccatcggcgacggacccgtgctgctgcccgacaaccattacctgagcacccagagcgccctgtccaaggaccctaacgagaagagagatcacatggtgctgctcgagttcgtgaccgccgccggcatcaccctgggcatggacgagctgtacaagagatcccgcgacatcagccacggctttcctcccgccgtggccgcccaagacgacgggaccctgcccatgagctgcgcccaggagtccggcatggacagacaccccgccgcctgtgccagcgccaggatcaacgtgtaa

SEQ ID NO: 1158 - DNA, 855 bp, Artificial Sequence
  Modified Open Reading Frame
atggtgtccaagggcgaggagctgttcaccggcgtggtgcctatcctggtggagctggacggcgacgtgaacggccacaagtttagcgtgtccggcgagggcgaaggcgacgccacctacggcaagctgaccctgaagttcatctgcaccaccggcaaactgcccgtgccctggcccaccctcgtgaccaccctgacctacggagtccagtgcttcagcagataccccgaccacatgaagcagcacgacttcttcaagtccgccatgccagagggctacgtgcaggaaagaaccatcttctttaaggacgacggaaactataagaccagagccgaggtgaagttcgagggagacaccctggtgaacagaatcgagctgaagggcatcgacttcaaagaggacggcaacatcctgggccacaaactggagtacaactacaacagccacaacgtgtacatcatggccgacaaacagaagaacgggatcaaggtgaactttaagatcagacacaacatcgaagacggcagcgtgcagctcgccgaccactaccagcagaacacacccatcggcgacggacccgtgctgctgcccgacaaccattacctgagcacccagagcgccctgtccaaggaccctaacgagaagagagatcacatggtgctgctcgagttcgtgaccgccgccggcatcaccctgggcatggacgagctgtacaagagatcccgcgacatcagccacggctttcctcccgccgtggccgcccaagacgacgggaccctgcccatgagctgcgcccaggagtccggcatggacagacaccccgccgcctgtgccagcgccaggatcaacgtgtaa

SEQ ID NO: 1159 - DNA, 144 bp, Artificial Sequence
  Modified Open Reading Frame
atgggtggttccggaggctccggataccagccatacagagtggtagtactaggcgggtcgggagggagcccctaccgggtcgtcgtgctttcgttcggcggctcggggggttccctctcgccccgctggtacttctactactga

SEQ ID NO: 1160 - DNA, 144 bp, Artificial Sequence
  Modified Open Reading Frame
atggggggatccggcggatccggctaccaaccataccgtgtggttgtgttaggcggatccggcggatccccctatagagtggtggtgctaagcttcgggggctcagggggatccctgagcccccgatggtacttctactactag

SEQ ID NO: 1161 - DNA, 144 bp, Artificial Sequence
  Modified Open Reading Frame
atgggcggcagcggcgggtcgggctaccagccgtaccgcgtagtggtgctaggcggttcgggtggtagcccgtaccgcgttgttgtcctgtccttcgggggctcaggcgggagcctgagcccccgatggtacttctattactag

SEQ ID NO: 1162 - DNA, 144 bp, Artificial Sequence
  Modified Open Reading Frame
atgggaggctccgggggctcgggctaccagccgtaccgcgtagtcgtgctgggcggcagcggcggcagcccgtatcgggttgtcgtgctgtcgttcggcggtagcggcggtagcctgagcccccggtggtacttctattactag

SEQ ID NO: 1163 - DNA, 144 bp, Artificial Sequence
  Modified Open Reading Frame
atggggggctccggtggttcggggtaccagccgtaccgcgtcgtggtgctgggcgggagcggcggcagcccgtaccgggttgtcgtgctctcgttcggggggtctgggggatcccttagcccccgctggtacttctactactaa

SEQ ID NO: 1164 - DNA, 144 bp, Artificial Sequence; identical to SEQ ID NO: 10
  Modified Open Reading Frame

SEQ ID NO: 1165 - RNA, 928 nt, artificial sequence
  nanoluciferase
gggacauuugcuucugacacaacuguguucacuagcaaccucaaacagacaccauguggcuaguaagccucgccaucguaacagccugcgccggcgccauggccgucuacccauacgauguaccagacuacgccggcuaccccuacgacgucccagacuacgcaggcuccuacccauacgacgucccagacuacgcaggaucaggcgucuucacacucgaagacuucguuggagacuggcgacagacagccggauacaaccuagaccaaguccuagagcaaggaggaguauccaguuuguuccaaaaccucggagucuccguaacaccaauccaaagaauaguccuauccggagagaacggauugaagaucgacauccacgucaucaucccguacgaaggccucagcggcgaccaaaugggccaaaucgaaaagauauucaaaguaguauacccaguagacgaccaccacuucaagguaauccuccacuacggcacacucguaauagacgggguaacuccaaacaugaucgacuacuucgggcgccccuacgagggcaucgccguauucgauggcaagaagaucaccguaacaggaacccuauggaacggcaacaagauuaucgacgaacguuuaaucaaccccgacggcucccuacuauuccgaguaaccaucaacggagucaccggauggcgccucugcgaacgaauauuggccuaagcucgcuuucuugcuguccaauuucuauuaaagguuccuuuguucccuaaguccaacuacuaaacugggggauauuaugaagggccuugagcaucuggauucugccuaauaaaaaacauuuauuuucauugcaauucuagagcggccgcuucgagcaugcucgaacgcugaucucacgccguggugaaguuccgcguacguacggcguc

SEQ ID NO: 1166 - RNA, 928 nt, artificial sequence
  nanoluciferase
gggacauuugcuucugacacaacuguguucacuagcaaccucaaacagacaccauguggcugguuucccucgcgauaguaaccgcuugcgcaggcgccauggccguguacccguaugacguccccgauuaugcaggcuacccguacgaugugccggauuacgcggggucauaccccuaugacguuccagauuaugccggcucuggcgucuucacccucgaagacuucgugggugacuggcgccagaccgccggcuauaaucuggaccagguucuggagcagggaggaguguccucccuguuccagaaccugggcgucagugugaccccgauccagcgcaucgugcuguccggggagaacggccucaaaaucgauauucauguuaucauuccauacgagggucucagcggcgaucagauggggcagaucgagaagaucuucaaggugguguaccccgucgaugaccaucauuucaaggugauccuucacuauggaacguuggucaucgacggggucaccccuaacaugauagauuauuucggucggcccuaugaggggaucgccguguuugacgguaagaagauuaccgucacugggacccucuggaaugguaacaagauuaucgaugagaggcugaucaacccggacgguagccugcuuuuucgggugacgaucaacggggucacgggcuggcgccugugcgagcggauacuugcgugagcucgcuuucuugcuguccaauuucuauuaaagguuccuuuguucccuaaguccaacuacuaaacugggggauauuaugaagggccuugagcaucuggauucugccuaauaaaaaacauuuauuuucauugcaauucuagagcggccgcuucgagcaaccucgaacgcugaucucacgccguggugaaguuccgcguacguacggcguc

SEQ ID NO: 1167 - RNA, 883 nt, artificial sequence
  RNA-3
gggacauuugcuucugacacaacuguguucacuagcaaccucaaacagacaccauggccguuuacccauacgauguuccugacuaugcgggcuaucccuaugacgucccggacuaugcaggcuccuauccauaugacguuccagauuacgcuggaucuggcgucuucacacucgaagauuucguuggggacuggcgacagacagccggcuacaaccuggaccaaguccuugaacagggagguguguccaguuuguuucagaaucucgggguguccguaacuccgauccaaaggauuguccugagcggugaaaaugggcugaagaucgacauccaugucaucaucccguaugaaggucugagcggcgaccaaaugggccagaucgaaaaaauuuuuaaggugguguacccuguggaugaucaucacuuuaaggugauccugcacuauggcacacugguaaucgacgggguuacgccgaacaugaucgacuauuucggacggccguaugaaggcaucgccguguucgacggcaaaaagaucacuguaacagggacccuguggaacggcaacaaaauuaucgacgagcgccugaucaaccccgacggcucccugcuguuccgaguaaccaucaacggagugaccggcuggcggcugugcgaacgcauucuggcguaauucuagagcggccgcuucgagcccguagaaucgcugaucucacgccguggugagcucgcuuucuugcuguccaauuucuauuaaagguuccuuuguucccuaaguccaacuacuaaacugggggauauuaugaagggccuugagcaucuggauucugccuaauaaaaaacauuuauuuucauugcaaaguuccgcguacguacggcguc

SEQ ID NO: 1168 - RNA, 928 nt, artificial sequence
  RNA-4
gggacauuugcuucugacacaacuguguucacuagcaaccucaaacagacaccauguggcuggugacccuggcgaucgucacggccugcgccggcgccauggcgguguacccguacgacgucccggacuacgccggguacccguacgacgucccggacuacgcgggcacguaccccuacgacguccccgacuacgcgggcuccggcguguucacgcucgaggacuucgucggggacuggcggcagaccgccggguacaaccuggaccagguccuggagcaggggggggucacgucccucuuccagaaccugggcgugugggucacccccauccagcgcaucguccugaccggggagaacggccucaagaucgacauccacgucaucaucccguacgagggccucagcggggaccagaugggccagaucgagaagaucuucaaggucgucuacccgguggacgaccaccacuucaaggugauccugcacuacgggacccucgugaucgacggcgugacccccaacaugaucgacuacuucgggcggcccuacgaggggaucgccguguucgacgggaagaagaucacggugaccgggacccucuggaacgggaacaagaucaucgacgagcgccucaucaacccggacgggucgcugcuguuccgggucacgaucaacggggucaccggguggcgccugugcgagcggauccuggccugauucuagagcggccgcuucgagccucuucgaacgcugaucucacgccguggugagcucgcuuucuugcuguccaauuucuauuaaagguuccuuuguucccuaaguccaacuacuaaacugggggauauuaugaagggccuugagcaucuggauucugccuaauaaaaaacauuuauuuucauugcaaaguuccgcguacguacggcguc

SEQ ID NO: 1169 - RNA, 928 nt, artificial seqeunce
  RNA-5
gggacauuugcuucugacacaacuguguucacuagcaaccucaaacagacaccauguggcuggugagcuuggccaucgugacggcuugugccggagcgauggccguauauccguacgaugucccggacuacgcgggauauccguacgaugugccggauuaugccgggaguuaucccuaugacgucccggauuaugccgggucuggcgucuucacccucgaagacuucgugggugacuggcgccagaccgccggguacaaccuggaccagguucuggaacagggaggaguuuccucccuguuccagaaccuggggguguccguuacccccauucagcgcauagugcugaguggggagaacggacucaaaauugacauucacgugauaaucccguacgagggauuaucaggugaucagaugggccaaauugagaagauuuucaagguggucuauccgguggaugaucaccacuucaaggugauccuccacuaugguacguuggucauagacggggugaccccgaauaugaucgacuacuucggcaggcccuacgagggcauugccguguuugacgguaagaagauuaccgucacugggacgcucuggaaugguaacaagaucauugaugagcgucucauuaacccugaugggucgcugcuauuccgugucaccaucaauggugucacgggauggcggcugugcgagagaauucucgcauaagcucgcuuucuugcuguccaauuucuauuaaagguuccuuuguucccuaaguccaacuacuaaacugggggauauuaugaagggccuugagcaucuggauucugccuaauaaaaaacauuuauuuucauugcaauucuagagcggccgcuucgagcgaucucgaacgcugaucucacgccguggugaaguuccgcguacguacggcguc

SEQ ID NO: 1170 - RNA, 928 nt, artificial sequence
  RNA-6
gggacauuugcuucugacacaacuguguucacuagcaaccucaaacagacaccauguggcucgucagucuggccaucguuacggcgugugccggcgccauggccgucuaucccuaugacgugccagauuacgccggcuacccguacgaugugccagacuaugcggguucguacccguaugacgugccagauuacgcuggaucaggggucuucacucucgaagacuuuguuggagacuggcggcagaccgccggcuacaacuuagaccagguuuuggaacagggaggaguauccucccuguuccaaaaccugggcgugagugugaccccuauccagcggauaguccucucgggggaaaauggccugaagauagacauucacgucauuauucccuacgagggacuauccggggaucaaauggggcagaucgaaaagauauucaagguaguguacccaguggaugaucaccacuucaaggugauccuccacuaugguacacuaguaaucgauggggugacccccaauaugaucgauuacuuuggaagaccguaugagggcauugcggucuucgacggcaagaaaaucaccguuaccggaacacucuggaacggcaauaaaauuauugacgagaggcucaucaaccccgacggaagccuguuauuccgugugacgaucaacggaguaacaggcuggcgguugugugagcgcaucuuggcguaauucuagagcggccgcuucgagcacgagugaacgcugaucucacgccguggugagcucgcuuucuugcuguccaauuucuauuaaagguuccuuuguucccuaaguccaacuacuaaacugggggauauuaugaagggccuugagcaucuggauucugccuaauaaaaaacauuuauuuucauugcaaaguuccgcguacguacggcguc

SEQ ID NO: 1171 - RNA, 239 nt, artificial sequence
  control spike in
ggccaaaggcgucgaguagacgccaacaacggaauugcgggaaaggggucaacagccguucaguaccaagucucaggggaaacuuugagauggccuugcaaaggguaugguaauaagcugacggacaugguccuaaccacgcagccaaguccuaagucaacagaucuucuguugauauggaugcaguucaaaaccaaaccgucagcgaguagcugacaaaaagaaacaacaacaacaac

SEQ ID NO: 1172 - RNA, 107 nt, artificial sequence
  stem loop
ggaaacgauagcagaagagaucgauauagagcauaagcuaagaauagaauagauaagauaguagcaucagaaggcuucggccuuuuaaaagaaacaacaacaacaac

SEQ ID NO: 1173 - RNA, 107 nt, artificial sequence
  Modified Open Reading Frame
ggaaacgauagcagaagagaucgauauagagcauaagcuaagaauagaauagauaagauaguagcaucauuugguuucggccggguaaaagaaacaacaacaacaac

What is claimed is:

1. An RNA therapeutic comprising:
an RNA molecule comprising a 5′ untranslated region, a 3′ untranslated region, and a coding sequence;
wherein the 5′ untranslated region is located 5′ of the coding sequence and the 3′ untranslated region is located 3′ of the coding sequence, and
wherein the coding sequence encodes for one or more viral epitopes.

2. The RNA therapeutic of claim 1, wherein the coding sequence is selected from the group consisting of: SEQ ID NO: 5 and SEQ ID NOs: 437-439.

3. The RNA therapeutic of claim 1, further comprising one or more of the group consisting of: a lubricant, a binder, a flavorant, and a coating.

4. The RNA therapeutic of claim 1, further comprising a capsule selected from the group consisting of: a virus, a viroid, a virion, a capsid, a bacterium, a lipid nanoparticle, a micelle, a DNA structure, and an RNA structure.

5. The RNA therapeutic of claim 1, wherein at least one nucleotide in the RNA molecule is replaced with an analog selected from the group consisting of: pseudouridine, 1-methyl-pseudouridine, and 5-methyl-cytidine, 1-methoxy-pseudouridine, and pseudo-isocytidine.

6. A method for increasing RNA stability comprising:
obtaining a target RNA sequence comprising a coding sequence;
altering at least one nucleotide within the RNA sequence, wherein the altered sequence improves a metric correlated with improved RNA function; and
synthesizing an RNA molecule representing the altered sequence.

7. The method of claim 6, wherein the altering step is performed by:
sampling a nucleotide within the target coding sequence, wherein the sampled nucleotide comprises an unpaired nucleotide within the coding sequence; and
substituting the sampled nucleotide with a new nucleotide to create a substituted coding sequence.

8. The method of claim 6, wherein the altered sequence possesses increased structure over the target coding sequence.

9. The method of claim 6, wherein the metric is selected from the group consisting of: free energy (dG) of an RNA molecule conformation, dG of the ensemble (dG(ensemble)), codon adaptation index (CAI), and expected Matthews Correlation Coefficient (MCC).

10. The method of claim 6, wherein the metric is selected from the group consisting of: maximum ladder distance (MLD), unpaired nucleotides, GC content, number of hairpins, number of 3-way junctions (3WJs), number of 4-way junctions, (4WJs), number of 5-way junctions (5WJs), ratios of hairpins to junctions, number of unpaired nucleotides, kissing loops, pseudoknots, tertiary contacts, multimeric designs, dimerization domains, and symmetrical structures.

11. The method of claim 6, wherein the metric is selected from the group consisting of: mean base pair proximity, probability of unpaired nucleotides, sum of paired bases, increased structure, summed probability of being unpaired, and predicted degradation score.

12. The method of claim 6, wherein the substituted coding sequence possesses a lower free energy than the target coding sequence.

13. The method of claim 6, wherein the target RNA sequence comprises at least one of the group consisting of: a poly-A tail, a 5′ untranslated region, and a 3′ untranslated region.

14. The method of claim 6, wherein the substituting step uses a greedy GC strategy, where if a C or G substitution is possible, the nucleotide is substituted for the nucleotide.

15. The method of claim 6, wherein the altered sequence possesses a lower DegScore than the target RNA sequence, wherein
DegScore=a*[stem nts]+b*[internal loop nts]+c*[hairpin nts]+d*[bulge nts]+e*[multiloop nts]+f*[exterior loop nts],
where nts stands for nucleotides, and
a-f represent coefficients for relative reactivity of nucleotides within a particular structure.

16. The method of claim 6, further comprising transfecting a cell with the synthesized RNA molecule.

17. The method of claim 6, further comprising treating an individual with the synthesized RNA molecule.

18. The method of claim 17, wherein the synthesized RNA molecule is formulated for medical use.

19. The method of claim 18, wherein the synthesized RNA molecule is formulated by combining the synthesized RNA molecule with at least one of the group consisting of: a lubricant, a binder, a flavorant, and a coating.

20. The method of claim 18, wherein the synthesized RNA molecule is encapsulated in at least one of the group consisting of: a virus, a viroid, a virion, a capsid, a bacterium, a lipid nanoparticle, a micelle, a DNA structure, and an RNA structure.

21. The method of claim 6, wherein altering at least one nucleotide within the RNA sequence comprises replacing at least one nucleotide in the RNA sequence with an analog selected from the group consisting of: pseudouridine, 1-methyl-pseudouridine, and 5-methyl-cytidine, 1-methoxy-pseudouridine, and pseudo-isocytidine.

22. The method of claim 6, wherein altering at least one nucleotide is iterated at least 100 times.

23. An RNA molecule to transfect a cell comprising: a 5′ untranslated region, a 3′ untranslated region, and a coding sequence, wherein the 5′ untranslated region is located 5′ of the coding sequence and the 3′ untranslated region is located 3′ of the coding sequence.

24. The RNA molecule of claim 23, wherein the coding sequence codes for one or more viral epitopes.

25. The RNA molecule of claim 24, wherein the coding sequence is selected from the group consisting of: SEQ ID NO: 5 and SEQ ID NOs: 437-439.

26. The RNA molecule of claim 23, wherein the coding sequence codes for green fluorescence protein.

27. The RNA molecule of claim 26, wherein the coding sequence is selected from the group consisting of: SEQ ID NO: 8 and SEQ ID NOs: 12-236.

28. The RNA molecule of claim 23, wherein the coding sequence codes for nanoluciferase.

29. The RNA molecule of claim 28, wherein the coding sequence is selected from the group consisting of SEQ ID NOs: 237-436.

30. The RNA molecule of claim 23, wherein at least one nucleotide in the RNA molecule is replaced with an analog selected from the group consisting of: pseudouridine, 1-methyl-pseudouridine, and 5-methyl-cytidine, 1-methoxy-pseudouridine, and pseudo-isocytidine.
